(19) United States
(12) Patent Application Publication
(10) Pub. No.: US 2018/0265902 A1
(43) Pub. Date: Sep. 20, 2018

(54) Beta-Alanine Aminotransferases For The Production of 3-Hydroxypropionic Acid

(71) Applicant: Novozymes A/S, Bagsvaerd (DK)

(72) Inventors: Monica Tassone, West Sacramento, CA (US); Audrey Diano, Vacaville, CA (US)

(73) Assignee: Novozymes A/S, Bagsvaerd (DK)

(21) Appl. No.: 15/754,402

(22) PCT Filed: Aug. 24, 2016
(86) PCT No.: PCT/US2016/048474

§ 371 Date: Feb. 22, 2018

Related U.S. Application Data
(60) Provisional application No. 62/209,260, filed on Aug. 24, 2015.

(51) Int. Cl. C12P 7/42; C12N 9/10; C07C 51/377; C07C 67/08; C07C 29/149

(52) U.S. Cl. CPC C12P 7/42; C12N 9/1096; C07C 29/149; C07C 51/377; C07C 67/08; C12Y 206/01019

(57) ABSTRACT

Provided herein are recombinant host cells having an active 3-Hydroxypropionic Acid (3-HP) pathway wherein the host cells comprise a heterologous polynucleotide encoding an aminotransferase of E.C. 2.6.1.19 and wherein the aminotransferase comprises the motif (A,C)-Xn-(GSLS)-Xn-SKA(L/l)(L/l). Also described are methods of making the host cells, and methods using the cells to produce 3-HP and derivatives of 3-HP (e.g., acrylic acid).

### CROSS-REFERENCE TO RELATED APPLICATIONS

[0001] This application claims priority benefit of U.S. provisional application Ser. No. 62/209,260, filed on Aug. 24, 2015. The content of this application is fully incorporated herein by reference.

### REFERENCE TO A SEQUENCE LISTING

[0002] This application contains a Sequence Listing in computer readable form, which is incorporated herein by reference.

### BACKGROUND

[0003] 3-hydroxypropionic acid (3-HP) is a three carbon carboxylic acid identified by the U.S. Department of Energy as one of the top 12 high-potential building block chemicals that can be made by fermentation. Alternative names for 3-HP, which is an isomer of lactic (2-hydroxypropionic) acid, include ethylene lactic acid and 3-hydroxypropionate. 3-HP is an attractive renewable platform chemical, with 100% theoretical yield from glucose, multiple functional groups that allow it to participate in a variety of chemical reactions, and low toxicity. 3-HP can be used as a substrate to form several commodity chemicals, such as 1,3-propanediol, malonic acid, acrylamide, and acrylic acid. Acrylic acid is a large-volume chemical (>7 billion lbs/year) used to make acrylate esters and superabsorbent polymers, and is currently derived from catalytic oxidation of propylene. Fermentative production of 3-HP would provide a sustainable alternative to petrochemicals as the feedstock for these commercially-significant chemicals, thus reducing energy consumption, dependence on foreign oil supplies, and the production of greenhouse gases.

[0004] β-alanine aminotransferase (BAAT) is an enzyme that converts β-alanine to malonate semialdehyde, the precursor to 3-HP (FIG. 1). The BAAT enzyme is believed to have similar origins to 4-aminobutyrate aminotransferases (gabT) (Andersen et al., 2007, FEBS J 274: 1804-1817). While BAAT/gabT aminotransferase homologs are known, it was not clear, prior to Applicant's disclosure below, which amino acids and/or motifs are responsible for the respective BAAT and gabT activities. It would be advantageous with some engineered 3-HP metabolic pathways to specifically express enzymes that are known to have BAAT activity.

### SUMMARY

[0005] Described herein are recombinant host cells having an active 3-HP pathway, wherein the recombinant cells comprise a heterologous polynucleotide encoding an aminotransferase of E.C. 2.6.1.19, and wherein the cells are capable of producing 3-HP. In some embodiments, the aminotransferase comprises the motif (A,C)-Xn-(GSLS)-Xn-SKA(L/l)(L/l). In some embodiments, the aminotransferase is other than a S. kluyveri, I. orientalis, or S. avermitilis aminotransferase. In some embodiments, the aminotransferase is a β-alanine aminotransferase (BAAT). In some embodiments, the aminotransferase comprises (i) AC at a positions corresponding to positions 103-104 of SEQ ID NO: 20; (ii) GSLS at positions corresponding to positions 194-197 of SEQ ID NO: 20; and/or (ii) SKA(L/l)(L/l) at positions corresponding to positions 354-358 of SEQ ID NO: 20.

[0006] In some embodiments, the aminotransferase (e.g., BAAT) has at least 60% sequence identity to SEQ ID NO: 206, SEQ ID NO: 207, SEQ ID NO: 208, SEQ ID NO: 209, SEQ ID NO: 218, SEQ ID NO: 220, SEQ ID NO: 222, SEQ ID NO: 224, SEQ ID NO: 226, SEQ ID NO: 228, SEQ ID NO: 230, SEQ ID NO: 232, or SEQ ID NO: 234.

[0007] In some embodiments, the recombinant cells comprise an active 3-HP pathway that proceeds through a β-alanine and/or malonate semialdehyde intermediate.

[0008] In some embodiments, the recombinant cells produce a greater amount of 3-HP compared to the cells without the heterologous polynucleotide encoding the encoding the aminotransferase (e.g., BAAT) when cultivated under identical conditions.

[0009] In some aspects, the recombinant cells comprise one or more (e.g., two, several) heterologous polynucleotides selected from a heterologous polynucleotide encoding a PYC; a heterologous polynucleotide encoding an AAT; a heterologous polynucleotide encoding an ADC; a heterologous polynucleotide encoding a 3-HPDH; and a heterologous polynucleotide encoding a PPC. In some embodiments, the recombinant cells comprise a heterologous polynucleotide encoding an aspartate 1-decarboxylase (ADC).

[0010] In some embodiments, the recombinant cells comprise a disruption to one or more endogenous genes encoding a PDC, ADH, GAL6, CYB2A, CYB2B, GPD, GPP, ALD, or PCK. In some embodiments, the recombinant cells comprise a disruption to one or both of an endogenous gene encoding a PDC and an endogenous gene encoding a GPD.

[0011] In some embodiments, the recombinant cells are bacterial or fungal cells. In some embodiments, the recombinant cells are yeast cells such as Issatchenkia, Candida, Kluyveromyces, Pichia, Schizosaccharomyces, Torulaspora, Zygosaccharomyces, or Saccharomyces yeast cells. In some embodiments, the recombinant cells are 3-HP-resistant yeast cells. In some embodiments, the recombinant cells are unable to ferment pentose sugars.

[0012] Also described are methods of producing 3-HP and related compounds. In one aspect is a method of producing 3-HP, comprising: (a) cultivating a recombinant cell described herein in a medium under suitable conditions to produce 3-HP; and (b) recovering the 3-HP. In another aspect is a method of producing acrylic acid or a salt thereof, comprising: (a) cultivating a recombinant cell described herein in a medium under suitable conditions to produce 3-HP; (b) recovering the 3-HP; (c) dehydrating the 3-HP under suitable conditions to produce acrylic acid or a salt thereof; and (d) recovering the acrylic acid or salt thereof.

### BRIEF DESCRIPTION OF THE FIGURES

[0013] FIG. 1 shows a summary of select 3-HP pathways from glucose.

[0014] FIG. 2 shows a representative multiple sequence alignment (MSA) for the I. orientalis aminotransferase of SEQ ID NO: 20, S. kluyveri aminotransferase of SEQ ID NO: 21, I. orientalis aminotransferase of SEQ ID NO: 211, S. kluyveri aminotransferase of SEQ ID NO: 212, C. arabinofermentans aminotransferase of SEQ ID NO: 207, B. bruxellensis aminotransferase of SEQ ID NO: 208, and P. membranifaciens aminotransferase of SEQ ID NO: 206 (top→bottom). Regions for the motif (A,C)-Xn-(GSLS)-Xn-SKA(L/l)(L/l) are circled.

[0015] FIG. 3 shows molecular model of the I. orientalis BAAT dimer (SEQ ID NO: 20) showing conserved positions 103-104 and 194-197 near the active site.

[0016] FIG. 4 shows a molecular model of the I. orientalis BAAT dimer (SEQ ID NO: 20) showing positions 354-358.

[0017] FIG. 5 shows a plasmid map for pMcTs343.

[0018] FIG. 6 shows a plasmid map for pMcTs351.

[0019] FIG. 7 shows a plasmid map for pMcTs352.

[0020] FIG. 8 shows a plasmid map for pMcTs356.

[0021] FIG. 9 shows a plasmid map for pMcTs342.

[0022] FIG. 10 shows a plasmid map for pMBin211.

[0023] FIG. 11 shows a plasmid map for pMBin218.

### DEFINITIONS

[0024] 3-HP: The term “3-HP” includes salt and acid forms of “3-hydroxypropionic acid” unless stated otherwise from the context in which it is used.

[0025] Abbreviations: 3-HPA, 3-hydroxypropionaldehyde; 3-HPDH, 3-hydroxypropionic acid dehydrogenase; AAM, alanine 2,3-aminomutase; AAT, aspartate aminotransferase; ACC, acetyl-CoA carboxylase; ADC, aspartate 1-decarboxylase; AKG, alpha-ketoglutarate; ALD, aldehyde dehydrogenase; BAAT, β-alanine aminotransferase; BCKA, branched-chain alpha-keto acid decarboxylase; bp, base pairs; CYB2, L-(+)-lactate-cytochrome c oxidoreductase; CYC, iso-2-cytochrome c; EMS, ethane methyl sulfonase; ENO, enolase; gabT, 4-aminobutyrate aminotransferase; GAPDH, glyceraldehyde-3-phosphate dehydrogenase 3; GPD, glycerol 3-phosphate dehydrogenase; GPP, glycerol 3-phosphate phosphatase; HIBADH, 3-hydroxyisobutyrate dehydrogenase; IPDA, indolepyruvate decarboxylase; KGD, alpha-ketoglutarate decarboxylase; LDH, lactate dehydrogenase; MAE, malic enzyme; MDHB, malate dehydrogenase B; OAA, oxaloacetate; PCK, phosphoenolpyruvate carboxykinase; PDC, pyruvate decarboxylase; PDH, pyruvate dehydrogenase; PEP, phosphoenolpyruvate; PGK, phosphoglycerate kinase; PPC, phosphoenolpyruvate carboxylase; PYC, pyruvate carboxylase; RKI, ribose 5-phosphate ketol-isomerase; TAL, transaldolase; TEF1, translation elongation factor-1; TEF2, translation elongation factor-2; TKL, transketolase, XDH, xylitol dehydrogenase; XR, xylose reductase; YP, yeast extract/peptone.

[0026] Active 3-HP pathway: As used herein, a host cell having an “active 3-HP pathway” produces active enzymes necessary to catalyze each reaction of a metabolic pathway in a sufficient amount to produce 3-HP from a fermentable sugar, and therefore is capable of producing 3-HP in measurable yields when cultivated under fermentation conditions in the presence of at least one fermentable sugar. A host cell having an active 3-HP pathway comprises one or more 3-HP pathway genes. A “3-HP pathway gene” as used herein refers to a gene that encodes an enzyme involved in an active 3-HP pathway.

[0027] The active enzymes necessary to catalyze each reaction in an active 3-HP pathway may result from activities of endogenous gene expression, activities of heterologous gene expression, or from a combination of activities of endogenous and heterologous gene expression, as described in more detail herein.

[0028] Allelic variant: The term “allelic variant” means any of two or more alternative forms of a gene occupying the same chromosomal locus. Allelic variation arises naturally through mutation, and may result in polymorphism within populations. Gene mutations can be silent (no change in the encoded polypeptide) or may encode polypeptides having altered amino acid sequences. An allelic variant of a polypeptide is a polypeptide encoded by an allelic variant of a gene.

[0029] Aminotransferase: As used herein, the term “aminotransferase” is defined as a β-alanine aminotransferase (BAAT) and/or 4-aminobutyrate aminotransferase (gabT) of E.C. 2.6.1.19. A “β-alanine aminotransferase” (BAAT) refers to an enzyme that has the ability to catalyze the conversion of β-alanine (BAL) to malonate semialdehyde. A pyd4 gene is sometimes referred to as encoding a BAAT enzyme. A “4-aminobutyrate aminotransferase” (gabT) refers to an enzyme that has the ability to catalyze the conversion of 4-aminobutyrate (GABA) to succinate semialdehyde. A uga1 gene is sometimes referred to as encoding a gabT enzyme. BAAT and gabT activities can be determined from cell-free extracts as described in the art, e.g., as described in Andersen et al., 2007, FEBS J 274: 1804-1817, or in the Examples section below. In some instances, an amino transferase may have one or both of BAAT and gabT activities.

[0030] Coding sequence: The term “coding sequence” or “coding region” means a polynucleotide sequence, which specifies the amino acid sequence of a polypeptide. The boundaries of the coding sequence are generally determined by an open reading frame, which usually begins with the ATG start codon or alternative start codons such as GTG and TTG and ends with a stop codon such as TAA, TAG, and TGA. The coding sequence may be a sequence of genomic DNA, cDNA, a synthetic polynucleotide, and/or a recombinant polynucleotide.

[0031] Control sequence: The term “control sequence” means a nucleic acid sequence necessary for polypeptide expression. Control sequences may be native or foreign to the polynucleotide encoding the polypeptide, and native or foreign to each other. Such control sequences include, but are not limited to, a leader sequence, polyadenylation sequence, propeptide sequence, promoter sequence, signal peptide sequence, and transcription terminator sequence. The control sequences may be provided with linkers for the purpose of introducing specific restriction sites facilitating ligation of the control sequences with the coding region of the polynucleotide encoding a polypeptide.

[0032] Disruption: The term “disruption” means that a coding region and/or control sequence of a referenced gene is partially or entirely modified (such as by deletion, insertion, and/or substitution of one or more nucleotides) resulting in the absence (inactivation) or decrease in expression, and/or the absence or decrease of enzyme activity of the encoded polypeptide. The effects of disruption can be measured using techniques known in the art such as detecting the absence or decrease of enzyme activity using from cell-free extract measurements referenced herein; or by the absence or decrease of corresponding mRNA (e.g., at least 25% decrease, at least 50% decrease, at least 60% decrease, at least 70% decrease, at least 80% decrease, or at least 90% decrease); the absence or decrease in the amount of corresponding polypeptide having enzyme activity (e.g., at least 25% decrease, at least 50% decrease, at least 60% decrease, at least 70% decrease, at least 80% decrease, or at least 90% decrease); or the absence or decrease of the specific activity of the corresponding polypeptide having enzyme activity (e.g., at least 25% decrease, at least 50% decrease, at least 60% decrease, at least 70% decrease, at least 80% decrease, or at least 90% decrease). Disruptions of a particular gene of interest can be generated by methods known in the art, e.g., by directed homologous recombination (see Methods in Yeast Genetics (1997 edition), Adams, Gottschling, Kaiser, and Stems, Cold Spring Harbor Press (1998)).

[0033] Endogenous gene: The term “endogenous gene” means a gene that is native to the referenced host cell. “Endogenous gene expression” means expression of an endogenous gene.

[0034] Expression: The term “expression” includes any step involved in the production of the polypeptide including, but not limited to, transcription, post-transcriptional modification, translation, post-translational modification, and secretion. Expression can be measured—for example, to detect increased expression—by techniques known in the art, such as measuring levels of mRNA and/or translated polypeptide.

[0035] Expression vector: The term “expression vector” means a linear or circular DNA molecule that comprises a polynucleotide encoding a polypeptide and is operably linked to control sequences, wherein the control sequences provide for expression of the polynucleotide encoding the polypeptide. At a minimum, the expression vector comprises a promoter sequence, and transcriptional and translational stop signal sequences.

[0036] Fermentable medium: The term “fermentable medium” or “fermentation medium” refers to a medium comprising one or more (e.g., two, several) sugars, such as glucose, fructose, sucrose, cellobiose, xylose, xylulose, arabinose, mannose, galactose, and/or soluble oligosaccharides, wherein the medium is capable, in part, of being converted (fermented) by a host cell into a desired product, such as 3-HP. In some instances, the fermentation medium is derived from a natural source, such as sugar cane, starch, or cellulose, and may be the result of pretreating the source by enzymatic hydrolysis (saccharification).

[0037] Heterologous polynucleotide: The term “heterologous polynucleotide” is defined herein as a polynucleotide that is not native to the host cell; a native polynucleotide in which structural modifications have been made to the coding region; a native polynucleotide whose expression is quantitatively altered as a result of a manipulation of the DNA by recombinant DNA techniques, e.g., a different (foreign) promoter; or a native polynucleotide in a host cell having one or more extra copies of the polynucleotide to quantitatively alter expression. A “heterologous gene” is a gene comprising a heterologous polynucleotide.

[0038] Host cell: The term “host cell” means any cell type that is susceptible to transformation, transfection, transduction, and the like with a nucleic acid construct or expression vector. The term “host cell” encompasses any progeny of a parent cell that is not identical to the parent cell due to mutations that occur during replication. The term “recombinant cell” is defined herein as a non-naturally occurring host cell comprising one or more (e.g., two, several) heterologous polynucleotides. The host cell may be a mutant strain described herein, or further disrupted to provide a mutant strain described herein.

[0039] Hybridization conditions: The term “very low stringency conditions” means for probes of at least 100 nucleotides in length, prehybridization and hybridization at 42° C. in 5×SSPE, 0.3% SDS, 200 micrograms/ml sheared and denatured salmon sperm DNA, and 25% formamide, following standard Southern blotting procedures for 12 to 24 hours. The carrier material is finally washed three times each for 15 minutes using 0.2×SSC, 0.2% SDS at 45° C.

[0040] The term “low stringency conditions” means for probes of at least 100 nucleotides in length, prehybridization and hybridization at 42° C. in 5×SSPE, 0.3% SDS, 200 micrograms/ml sheared and denatured salmon sperm DNA, and 25% formamide, following standard Southern blotting procedures for 12 to 24 hours. The carrier material is finally washed three times each for 15 minutes using 0.2×SSC, 0.2% SDS at 50° C.

[0041] The term “medium stringency conditions” means for probes of at least 100 nucleotides in length, prehybridization and hybridization at 42° C. in 5×SSPE, 0.3% SDS, 200 micrograms/ml sheared and denatured salmon sperm DNA, and 35% formamide, following standard Southern blotting procedures for 12 to 24 hours. The carrier material is finally washed three times each for 15 minutes using 0.2×SSC, 0.2% SDS at 55° C.

[0042] The term “medium-high stringency conditions” means for probes of at least 100 nucleotides in length, prehybridization and hybridization at 42° C. in 5×SSPE, 0.3% SDS, 200 micrograms/ml sheared and denatured salmon sperm DNA, and 35% formamide, following standard Southern blotting procedures for 12 to 24 hours. The carrier material is finally washed three times each for 15 minutes using 0.2×SSC, 0.2% SDS at 60° C.

[0043] The term “high stringency conditions” means for probes of at least 100 nucleotides in length, prehybridization and hybridization at 42° C. in 5×SSPE, 0.3% SDS, 200 micrograms/ml sheared and denatured salmon sperm DNA, and 50% formamide, following standard Southern blotting procedures for 12 to 24 hours. The carrier material is finally washed three times each for 15 minutes using 0.2×SSC, 0.2% SDS at 65° C.

[0044] The term “very high stringency conditions” means for probes of at least 100 nucleotides in length, prehybridization and hybridization at 42° C. in 5×SSPE, 0.3% SDS, 200 micrograms/ml sheared and denatured salmon sperm DNA, and 50% formamide, following standard Southern blotting procedures for 12 to 24 hours. The carrier material is finally washed three times each for 15 minutes using 0.2×SSC, 0.2% SDS at 70° C.

[0045] Isolated: The term “isolated” means a substance in a form or environment that does not occur in nature. Non-limiting examples of isolated substances include (1) any non-naturally occurring substance, (2) any substance including, but not limited to, any host cell, enzyme, variant, nucleic acid, protein, peptide or cofactor, that is at least partially removed from one or more or all of the naturally occurring constituents with which it is associated in nature; (3) any substance modified by the hand of man relative to that substance found in nature; or (4) any substance modified by increasing the amount of the substance relative to other components with which it is naturally associated.

[0046] Mutant: The term “mutant” means the resulting strain after one or more disruptions are made to a parent strain.

[0047] Nucleic acid construct: The term “nucleic acid construct” means a polynucleotide comprises one or more (e.g., two, several) control sequences. The polynucleotide may be single-stranded or double-stranded, and may be isolated from a naturally occurring gene, modified to contain segments of nucleic acids in a manner that would not otherwise exist in nature, or synthetic.

[0048] Operably linked: The term “operably linked” means a configuration in which a control sequence is placed at an appropriate position relative to the coding sequence of a polynucleotide such that the control sequence directs expression of the coding sequence.

[0049] Sequence Identity: The relatedness between two amino acid sequences or between two nucleotide sequences is described by the parameter “sequence identity”.

[0050] For purposes described herein, the degree of sequence identity between two amino acid sequences is determined using the Needleman-Wunsch algorithm (Needleman and Wunsch, J. Mol. Biol. 1970, 48, 443-453) as implemented in the Needle program of the EMBOSS package (EMBOSS: The European Molecular Biology Open Software Suite, Rice et al., Trends Genet 2000, 16, 276-277), preferably version 3.0.0 or later. The optional parameters used are gap open penalty of 10, gap extension penalty of 0.5, and the EBLOSUM62 (EMBOSS version of BLOSUM62) substitution matrix. The output of Needle labeled “longest identity” (obtained using the -nobrief option) is used as the percent identity and is calculated as follows:

(Identical Residues×100)/(Length of the Referenced Sequence−Total Number of Gaps in Alignment)

[0051] For purposes described herein, the degree of sequence identity between two deoxyribonucleotide sequences is determined using the Needleman-Wunsch algorithm (Needleman and Wunsch, 1970, supra) as implemented in the Needle program of the EMBOSS package (EMBOSS: The European Molecular Biology Open Software Suite, Rice et al., 2000, supra), preferably version 3.0.0 or later. The optional parameters used are gap open penalty of 10, gap extension penalty of 0.5, and the EDNAFULL (EMBOSS version of NCBI NUC4.4) substitution matrix. The output of Needle labeled “longest identity” (obtained using the -nobrief option) is used as the percent identity and is calculated as follows:

(Identical Deoxyribonucleotides×100)/(Length of Referenced Sequence−Total Number of Gaps in Alignment)

[0052] Volumetric productivity: The term “volumetric productivity” refers to the amount of referenced product produced (e.g., the amount of 3-HP produced) per volume of the system used (e.g., the total volume of media and contents therein) per unit of time.

[0053] Reference to “about” a value or parameter herein includes aspects that are directed to that value or parameter per se. For example, description referring to “about X” includes the aspect “X”. When used in combination with measured values, “about” includes a range that encompasses at least the uncertainty associated with the method of measuring the particular value, and can include a range of plus or minus two standard deviations around the stated value.

[0054] As used herein and in the appended claims, the singular forms “a,” “or,” and “the” include plural referents unless the context clearly dictates otherwise. It is understood that the aspects described herein include “consisting” and/or “consisting essentially of” aspects.

[0055] Unless defined otherwise or clearly indicated by context, all technical and scientific terms used herein have the same meaning as commonly understood by one of ordinary skill in the art.

### DETAILED DESCRIPTION

[0056] Described herein, inter alia, are recombinant cells having an active 3-HP pathway which comprise a heterologous polynucleotide encoding a aminotransferase of E.C. 2.6.1.19, wherein the aminotransferase has β-alanine aminotransferase (BAAT) activity. While aminotransferases of E.C. 2.6.1.19 are known to have either β-alanine aminotransferase (BAAT) activity, 4-aminobutyrate aminotransferase (gabT) activity, or both BAAT and gabT activity (Anderson et al, FEBS 2007, 274, 1804-1817), it was unclear which regions of these enzymes are responsible for activity toward the β-alanine and/or GABA substrate.

[0057] As described in the examples below, the Applicant has identified three putative regions of aminotransterase enzymes unique to those aminotransferases having β-alanine aminotransferase (BAAT) activity: (i) AC at a positions corresponding to positions 103-104 of SEQ ID NO: 20; (ii) GSLS at positions corresponding to positions 194-197 of SEQ ID NO: 20; and (iii) SKA(L/l)(L/l) at positions corresponding to positions 354-358 of SEQ ID NO: 20. Because the (A,C)-Xn-(GSLS)-Xn-SKA(L/l)(L/l) motif is unique to β-alanine aminotransferases (BAAT) and absent in 4-aminobutyrate aminotransferases (gabT), the Applicant has taught the skilled artisan which enzymes—based on sequence analysis to identify the motif—may be used in an active 3-HP pathway which converts β-alanine (BAL) to malonate semialdehyde (See, FIG. 1).

[0058] The aminotransferase (e.g., BAAT) can be any aminotransferase comprising the motif(s) described herein and/or related to the sequences described herein that is suitable for the host cells and their methods of use, such as the aminotransferases described by specific SEQ ID numbers, or variants thereof that retain aminotransferase activity (such as artificial variants or a natural variants from other species).

[0059] Accordingly, in one aspect, the heterologous polynucleotide encodes an aminotransferase of E.C. 2.6.1.19, wherein the aminotransferase (a) comprises the motif (A,C)-Xn-(GSLS)-Xn-SKA(L/l)(L/l); and (b) has β-alanine aminotransferase (BAAT) activity. In some embodiments, the aminotransferase is other than a S. kluyveri, I. orientalis, or S. avermitilis aminotransferase.

[0060] In some embodiments, the aminotransferase comprises: (i) AC at a positions corresponding to positions 103-104 of SEQ ID NO: 20; (ii) GSLS at positions corresponding to positions 194-197 of SEQ ID NO: 20; and/or (iii) SKA(L/l)(L/l) at positions corresponding to positions 354-358 of SEQ ID NO: 20. For purposes of the present invention, the sequence of SEQ ID NO: 20 is used to determine the corresponding amino acid residue in another aminotransferase. The amino acid sequence of another aminotransferase is aligned with SEQ ID NO: 20, and based on the alignment, the amino acid position number corresponding to any amino acid residue in SEQ ID NO: 20 is determined using the Needleman-Wunsch algorithm (Needleman and Wunsch, 1970, J. Mol. Biol. 48: 443-453) as implemented in the Needle program of the EMBOSS package (EMBOSS: The European Molecular Biology Open Software Suite, Rice et al., 2000, Trends Genet. 16: 276-277), preferably version 5.0.0 or later. The parameters used are a gap open penalty of 10, a gap extension penalty of 0.5, and the EBLOSUM62 (EMBOSS version of BLOSUM62) substitution matrix. Numbering of the amino acid positions is based on the full-length polypeptide of SEQ ID NO: 20 wherein position 1 is the first amino acid of the peptide (i.e., Met). For example, based on alignment, the position corresponding to the alanine at position 103 of SEQ ID NO: 4 corresponds to the alanine at position 103 of the Pichia membranifaciens BAAT of SEQ ID NO: 206, and to the alanine at position 104 of Candida guilliermondii of SEQ ID NO: 207.

[0061] In some aspects, the aminotransferase (e.g., BAAT comprising the (A,C)-Xn-(GSLS)-Xn-SKA(L/l)(L/l) motif) has at least 20%, e.g., at least 40%, at least 50%, at least 60%, at least 70%, at least 80%, at least 90%, at least 95%, at least 96%, at least 97%, at least 98%, at least 99%, or 100% of the aminotransferase activity (e.g., BAAT activity) of SEQ ID NO: 20, SEQ ID NO: 21, SEQ ID NO: 22, SEQ ID NO: 206, SEQ ID NO: 207, SEQ ID NO: 208, SEQ ID NO: 209, SEQ ID NO: 218, SEQ ID NO: 220, SEQ ID NO: 222, SEQ ID NO: 224, SEQ ID NO: 226, SEQ ID NO: 228, SEQ ID NO: 230, SEQ ID NO: 232, or SEQ ID NO: 234 under the same conditions.

[0062] In some embodiments the aminotransferase has gabT activity in addition to BAAT activity, meaning that it has activity on 4-aminobutyrate (GABA) as well as β-alanine (BAL). In some embodiments, the aminotransferase is derived from a native gabT gene (e.g., by random or directed engineering) to encode a polypeptide with BAAT activity. In some embodiments, the aminotransferase has an increased specificity for β-alanine (BAL) compared to 4-aminobutyrate (GABA) (e.g., greater than 2-fold, 5-fold, 10-fold, 20-fold, 50-fold, 100-fold, 200-fold, 500-fold, or 1000-fold specificity for β-alanine compared to GABA).

[0063] In some embodiments, the recombinant cells comprise an active 3-HP pathway that proceeds through a β-alanine and/or malonate semialdehyde intermediate. In some aspects, the cells lack an endogenous BAAT gene or have a disruption of an endogenous BAAT. In one aspect, BAAT is present in the cytosol of the host cells.

[0064] In one embodiment, the heterologous polynucleotide encodes an aminotransferase (e.g., BAAT comprising the (A,C)-Xn-(GSLS)-Xn-SKA(L/l)(L/l) motif) that comprises or consists of the amino acid sequence of SEQ ID NO: 206. In another embodiment, the aminotransferase comprises or consists of the amino acid sequence of SEQ ID NO: 207. In another embodiment, the aminotransferase comprises or consists of the amino acid sequence of SEQ ID NO: 208. In another embodiment, the aminotransferase comprises or consists of the amino acid sequence of SEQ ID NO: 209. In another embodiment, the aminotransferase comprises or consists of the amino acid sequence of SEQ ID NO: 218. In another embodiment, the aminotransferase comprises or consists of the amino acid sequence of SEQ ID NO: 220. In another embodiment, the aminotransferase comprises or consists of the amino acid sequence of SEQ ID NO: 222. In another embodiment, the aminotransferase comprises or consists of the amino acid sequence of SEQ ID NO: 224. In another embodiment, the aminotransferase comprises or consists of the amino acid sequence of SEQ ID NO: 226. In another embodiment, the aminotransferase comprises or consists of the amino acid sequence of SEQ ID NO: 228. In another embodiment, the aminotransferase comprises or consists of the amino acid sequence of SEQ ID NO: 230. In another embodiment, the aminotransferase comprises or consists of the amino acid sequence of SEQ ID NO: 232. In another embodiment, the aminotransferase comprises or consists of the amino acid sequence of SEQ ID NO: 234.

[0065] In another embodiment, the aminotransferase lacks an N-terminal mitochondrial target sequence (MTS). Enzyme mitochondrial target sequences may be identified using computational programs known in the art, such as Target P (Emanuelsson et al, Nat Protoc 2, 953-971 (2007)) and MitoProt (Claros et al, Eur. J. Biochem. 241, 779-786 (1996)).

[0066] In another embodiment, the heterologous polynucleotide encodes a fragment of a polypeptide of SEQ ID NO: 206, SEQ ID NO: 207, SEQ ID NO: 208, SEQ ID NO: 209, SEQ ID NO: 218, SEQ ID NO: 220, SEQ ID NO: 222, SEQ ID NO: 224, SEQ ID NO: 226, SEQ ID NO: 228, SEQ ID NO: 230, SEQ ID NO: 232, or SEQ ID NO: 234, wherein the fragment has aminotransferase activity (e.g., BAAT activity). In one embodiment, the number of amino acid residues in the fragment is at least 75%, e.g., at least 80%, 85%, 90%, or 95% of the number of amino acid residues in the referenced sequence.

[0067] The aminotransferase may also be a variant of the described aminotransferases. In one embodiment, the aminotransferase (e.g., BAAT comprising the (A,C)-Xn-(GSLS)-Xn-SKA(L/l)(L/l) motif) has at least 60%, e.g., at least 65%, at least 70%, at least 75%, at least 80%, at least 85%, at least 90%, at least 91%, at least 92%, at least 93%, at least 94%, at least 95%, at least 96%, at least 97%, at least 98%, at least 99%, or 100% sequence identity to SEQ ID NO: 206. In one embodiment, the aminotransferase sequence differs by no more than ten amino acids, e.g., by no more than five amino acids, by no more than four amino acids, by no more than three amino acids, by no more than two amino acids, or by one amino acid from SEQ ID NO: 206. In one embodiment, the aminotransferase comprises or consists of the amino acid sequence of SEQ ID NO: 206, or an allelic variant, or a fragment thereof having aminotransferase activity (e.g., BAAT activity). In one embodiment, the aminotransferase has an amino acid substitution, deletion, and/or insertion of one or more (e.g., two, several) amino acids of SEQ ID NO: 206. In some embodiments, the total number of amino acid substitutions, deletions and/or insertions is not more than 10, e.g., not more than 9, 8, 7, 6, 5, 4, 3, 2, or 1.

[0068] In one embodiment, the aminotransferase (e.g., BAAT comprising the (A,C)-Xn-(GSLS)-Xn-SKA(L/l)(L/l) motif) has at least 60%, e.g., at least 65%, at least 70%, at least 75%, at least 80%, at least 85%, at least 90%, at least 91%, at least 92%, at least 93%, at least 94%, at least 95%, at least 96%, at least 97%, at least 98%, at least 99%, or 100% sequence identity to SEQ ID NO: 207. In one embodiment, the aminotransferase sequence differs by no more than ten amino acids, e.g., by no more than five amino acids, by no more than four amino acids, by no more than three amino acids, by no more than two amino acids, or by one amino acid from SEQ ID NO: 207. In one embodiment, the aminotransferase comprises or consists of the amino acid sequence of SEQ ID NO: 207, or an allelic variant, or a fragment thereof having aminotransferase activity (e.g., BAAT activity). In one embodiment, the aminotransferase has an amino acid substitution, deletion, and/or insertion of one or more (e.g., two, several) amino acids of SEQ ID NO: 207. In some embodiments, the total number of amino acid substitutions, deletions and/or insertions is not more than 10, e.g., not more than 9, 8, 7, 6, 5, 4, 3, 2, or 1.

[0069] In one embodiment, the aminotransferase (e.g., BAAT comprising the (A,C)-Xn-(GSLS)-Xn-SKA(L/l)(L/l) motif) has at least 60%, e.g., at least 65%, at least 70%, at least 75%, at least 80%, at least 85%, at least 90%, at least 91%, at least 92%, at least 93%, at least 94%, at least 95%, at least 96%, at least 97%, at least 98%, at least 99%, or 100% sequence identity to SEQ ID NO: 208. In one embodiment, the aminotransferase sequence differs by no more than ten amino acids, e.g., by no more than five amino acids, by no more than four amino acids, by no more than three amino acids, by no more than two amino acids, or by one amino acid from SEQ ID NO: 208. In one embodiment, the aminotransferase comprises or consists of the amino acid sequence of SEQ ID NO: 208, or an allelic variant, or a fragment thereof having aminotransferase activity (e.g., BAAT activity). In one embodiment, the aminotransferase has an amino acid substitution, deletion, and/or insertion of one or more (e.g., two, several) amino acids of SEQ ID NO: 208. In some embodiments, the total number of amino acid substitutions, deletions and/or insertions is not more than 10, e.g., not more than 9, 8, 7, 6, 5, 4, 3, 2, or 1.

[0070] In one embodiment, the aminotransferase (e.g., BAAT comprising the (A,C)-Xn-(GSLS)-Xn-SKA(L/l)(L/l) motif) has at least 60%, e.g., at least 65%, at least 70%, at least 75%, at least 80%, at least 85%, at least 90%, at least 91%, at least 92%, at least 93%, at least 94%, at least 95%, at least 96%, at least 97%, at least 98%, at least 99%, or 100% sequence identity to SEQ ID NO: 209. In one embodiment, the aminotransferase sequence differs by no more than ten amino acids, e.g., by no more than five amino acids, by no more than four amino acids, by no more than three amino acids, by no more than two amino acids, or by one amino acid from SEQ ID NO: 209. In one embodiment, the aminotransferase comprises or consists of the amino acid sequence of SEQ ID NO: 209, or an allelic variant, or a fragment thereof having aminotransferase activity (e.g., BAAT activity). In one embodiment, the aminotransferase has an amino acid substitution, deletion, and/or insertion of one or more (e.g., two, several) amino acids of SEQ ID NO: 209. In some embodiments, the total number of amino acid substitutions, deletions and/or insertions is not more than 10, e.g., not more than 9, 8, 7, 6, 5, 4, 3, 2, or 1.

[0071] In one embodiment, the aminotransferase (e.g., BAAT comprising the (A,C)-Xn-(GSLS)-Xn-SKA(L/l)(L/l) motif) has at least 60%, e.g., at least 65%, at least 70%, at least 75%, at least 80%, at least 85%, at least 90%, at least 91%, at least 92%, at least 93%, at least 94%, at least 95%, at least 96%, at least 97%, at least 98%, at least 99%, or 100% sequence identity to SEQ ID NO: 218. In one embodiment, the aminotransferase sequence differs by no more than ten amino acids, e.g., by no more than five amino acids, by no more than four amino acids, by no more than three amino acids, by no more than two amino acids, or by one amino acid from SEQ ID NO: 218. In one embodiment, the aminotransferase comprises or consists of the amino acid sequence of SEQ ID NO: 218, or an allelic variant, or a fragment thereof having aminotransferase activity (e.g., BAAT activity). In one embodiment, the aminotransferase has an amino acid substitution, deletion, and/or insertion of one or more (e.g., two, several) amino acids of SEQ ID NO: 218. In some embodiments, the total number of amino acid substitutions, deletions and/or insertions is not more than 10, e.g., not more than 9, 8, 7, 6, 5, 4, 3, 2, or 1.

[0072] In one embodiment, the aminotransferase (e.g., BAAT comprising the (A,C)-Xn-(GSLS)-Xn-SKA(L/l)(L/l) motif) has at least 60%, e.g., at least 65%, at least 70%, at least 75%, at least 80%, at least 85%, at least 90%, at least 91%, at least 92%, at least 93%, at least 94%, at least 95%, at least 96%, at least 97%, at least 98%, at least 99%, or 100% sequence identity to SEQ ID NO: 220. In one embodiment, the aminotransferase sequence differs by no more than ten amino acids, e.g., by no more than five amino acids, by no more than four amino acids, by no more than three amino acids, by no more than two amino acids, or by one amino acid from SEQ ID NO: 220. In one embodiment, the aminotransferase comprises or consists of the amino acid sequence of SEQ ID NO: 220, or an allelic variant, or a fragment thereof having aminotransferase activity (e.g., BAAT activity). In one embodiment, the aminotransferase has an amino acid substitution, deletion, and/or insertion of one or more (e.g., two, several) amino acids of SEQ ID NO: 220. In some embodiments, the total number of amino acid substitutions, deletions and/or insertions is not more than 10, e.g., not more than 9, 8, 7, 6, 5, 4, 3, 2, or 1.

[0073] In one embodiment, the aminotransferase (e.g., BAAT comprising the (A,C)-Xn-(GSLS)-Xn-SKA(L/l)(L/l) motif) has at least 60%, e.g., at least 65%, at least 70%, at least 75%, at least 80%, at least 85%, at least 90%, at least 91%, at least 92%, at least 93%, at least 94%, at least 95%, at least 96%, at least 97%, at least 98%, at least 99%, or 100% sequence identity to SEQ ID NO: 222. In one embodiment, the aminotransferase sequence differs by no more than ten amino acids, e.g., by no more than five amino acids, by no more than four amino acids, by no more than three amino acids, by no more than two amino acids, or by one amino acid from SEQ ID NO: 222. In one embodiment, the aminotransferase comprises or consists of the amino acid sequence of SEQ ID NO: 222, or an allelic variant, or a fragment thereof having aminotransferase activity (e.g., BAAT activity). In one embodiment, the aminotransferase has an amino acid substitution, deletion, and/or insertion of one or more (e.g., two, several) amino acids of SEQ ID NO: 222. In some embodiments, the total number of amino acid substitutions, deletions and/or insertions is not more than 10, e.g., not more than 9, 8, 7, 6, 5, 4, 3, 2, or 1.

[0074] In one embodiment, the aminotransferase (e.g., BAAT comprising the (A,C)-Xn-(GSLS)-Xn-SKA(L/l)(L/l) motif) has at least 60%, e.g., at least 65%, at least 70%, at least 75%, at least 80%, at least 85%, at least 90%, at least 91%, at least 92%, at least 93%, at least 94%, at least 95%, at least 96%, at least 97%, at least 98%, at least 99%, or 100% sequence identity to SEQ ID NO: 224. In one embodiment, the aminotransferase sequence differs by no more than ten amino acids, e.g., by no more than five amino acids, by no more than four amino acids, by no more than three amino acids, by no more than two amino acids, or by one amino acid from SEQ ID NO: 224. In one embodiment, the aminotransferase comprises or consists of the amino acid sequence of SEQ ID NO: 224, or an allelic variant, or a fragment thereof having aminotransferase activity (e.g., BAAT activity). In one embodiment, the aminotransferase has an amino acid substitution, deletion, and/or insertion of one or more (e.g., two, several) amino acids of SEQ ID NO: 224. In some embodiments, the total number of amino acid substitutions, deletions and/or insertions is not more than 10, e.g., not more than 9, 8, 7, 6, 5, 4, 3, 2, or 1.

[0075] In one embodiment, the aminotransferase (e.g., BAAT comprising the (A,C)-Xn-(GSLS)-Xn-SKA(L/l)(L/l) motif) has at least 60%, e.g., at least 65%, at least 70%, at least 75%, at least 80%, at least 85%, at least 90%, at least 91%, at least 92%, at least 93%, at least 94%, at least 95%, at least 96%, at least 97%, at least 98%, at least 99%, or 100% sequence identity to SEQ ID NO: 226. In one embodiment, the aminotransferase sequence differs by no more than ten amino acids, e.g., by no more than five amino acids, by no more than four amino acids, by no more than three amino acids, by no more than two amino acids, or by one amino acid from SEQ ID NO: 226. In one embodiment, the aminotransferase comprises or consists of the amino acid sequence of SEQ ID NO: 226, or an allelic variant, or a fragment thereof having aminotransferase activity (e.g., BAAT activity). In one embodiment, the aminotransferase has an amino acid substitution, deletion, and/or insertion of one or more (e.g., two, several) amino acids of SEQ ID NO: 226. In some embodiments, the total number of amino acid substitutions, deletions and/or insertions is not more than 10, e.g., not more than 9, 8, 7, 6, 5, 4, 3, 2, or 1.

[0076] In one embodiment, the aminotransferase (e.g., BAAT comprising the (A,C)-Xn-(GSLS)-Xn-SKA(L/l)(L/l) motif) has at least 60%, e.g., at least 65%, at least 70%, at least 75%, at least 80%, at least 85%, at least 90%, at least 91%, at least 92%, at least 93%, at least 94%, at least 95%, at least 96%, at least 97%, at least 98%, at least 99%, or 100% sequence identity to SEQ ID NO: 228. In one embodiment, the aminotransferase sequence differs by no more than ten amino acids, e.g., by no more than five amino acids, by no more than four amino acids, by no more than three amino acids, by no more than two amino acids, or by one amino acid from SEQ ID NO: 228. In one embodiment, the aminotransferase comprises or consists of the amino acid sequence of SEQ ID NO: 228, or an allelic variant, or a fragment thereof having aminotransferase activity (e.g., BAAT activity). In one embodiment, the aminotransferase has an amino acid substitution, deletion, and/or insertion of one or more (e.g., two, several) amino acids of SEQ ID NO: 228. In some embodiments, the total number of amino acid substitutions, deletions and/or insertions is not more than 10, e.g., not more than 9, 8, 7, 6, 5, 4, 3, 2, or 1.

[0077] In one embodiment, the aminotransferase (e.g., BAAT comprising the (A,C)-Xn-(GSLS)-Xn-SKA(L/l)(L/l) motif) has at least 60%, e.g., at least 65%, at least 70%, at least 75%, at least 80%, at least 85%, at least 90%, at least 91%, at least 92%, at least 93%, at least 94%, at least 95%, at least 96%, at least 97%, at least 98%, at least 99%, or 100% sequence identity to SEQ ID NO: 230. In one embodiment, the aminotransferase sequence differs by no more than ten amino acids, e.g., by no more than five amino acids, by no more than four amino acids, by no more than three amino acids, by no more than two amino acids, or by one amino acid from SEQ ID NO: 230. In one embodiment, the aminotransferase comprises or consists of the amino acid sequence of SEQ ID NO: 230, or an allelic variant, or a fragment thereof having aminotransferase activity (e.g., BAAT activity). In one embodiment, the aminotransferase has an amino acid substitution, deletion, and/or insertion of one or more (e.g., two, several) amino acids of SEQ ID NO: 230. In some embodiments, the total number of amino acid substitutions, deletions and/or insertions is not more than 10, e.g., not more than 9, 8, 7, 6, 5, 4, 3, 2, or 1.

[0078] In one embodiment, the aminotransferase (e.g., BAAT comprising the (A,C)-Xn-(GSLS)-Xn-SKA(L/l)(L/l) motif) has at least 60%, e.g., at least 65%, at least 70%, at least 75%, at least 80%, at least 85%, at least 90%, at least 91%, at least 92%, at least 93%, at least 94%, at least 95%, at least 96%, at least 97%, at least 98%, at least 99%, or 100% sequence identity to SEQ ID NO: 232. In one embodiment, the aminotransferase sequence differs by no more than ten amino acids, e.g., by no more than five amino acids, by no more than four amino acids, by no more than three amino acids, by no more than two amino acids, or by one amino acid from SEQ ID NO: 232. In one embodiment, the aminotransferase comprises or consists of the amino acid sequence of SEQ ID NO: 232, or an allelic variant, or a fragment thereof having aminotransferase activity (e.g., BAAT activity). In one embodiment, the aminotransferase has an amino acid substitution, deletion, and/or insertion of one or more (e.g., two, several) amino acids of SEQ ID NO: 232. In some embodiments, the total number of amino acid substitutions, deletions and/or insertions is not more than 10, e.g., not more than 9, 8, 7, 6, 5, 4, 3, 2, or 1.

[0079] In one embodiment, the aminotransferase (e.g., BAAT comprising the (A,C)-Xn-(GSLS)-Xn-SKA(L/l)(L/l) motif) has at least 60%, e.g., at least 65%, at least 70%, at least 75%, at least 80%, at least 85%, at least 90%, at least 91%, at least 92%, at least 93%, at least 94%, at least 95%, at least 96%, at least 97%, at least 98%, at least 99%, or 100% sequence identity to SEQ ID NO: 234. In one embodiment, the aminotransferase sequence differs by no more than ten amino acids, e.g., by no more than five amino acids, by no more than four amino acids, by no more than three amino acids, by no more than two amino acids, or by one amino acid from SEQ ID NO: 234. In one embodiment, the aminotransferase comprises or consists of the amino acid sequence of SEQ ID NO: 234, or an allelic variant, or a fragment thereof having aminotransferase activity (e.g., BAAT activity). In one embodiment, the aminotransferase has an amino acid substitution, deletion, and/or insertion of one or more (e.g., two, several) amino acids of SEQ ID NO: 234. In some embodiments, the total number of amino acid substitutions, deletions and/or insertions is not more than 10, e.g., not more than 9, 8, 7, 6, 5, 4, 3, 2, or 1.

[0080] The amino acid changes are generally of a minor nature, that is conservative amino acid substitutions or insertions that do not significantly affect the folding and/or activity of the protein; small deletions, typically of one to about 30 amino acids; small amino-terminal or carboxyl-terminal extensions, such as an amino-terminal methionine residue; a small linker peptide of up to about 20-25 residues; or a small extension that facilitates purification by changing net charge or another function, such as a poly-histidine tract, an antigenic epitope or a binding domain.

[0081] Examples of conservative substitutions are within the group of basic amino acids (arginine, lysine and histidine), acidic amino acids (glutamic acid and aspartic acid), polar amino acids (glutamine and asparagine), hydrophobic amino acids (leucine, isoleucine and valine), aromatic amino acids (phenylalanine, tryptophan and tyrosine), and small amino acids (glycine, alanine, serine, threonine and methionine). Amino acid substitutions that do not generally alter specific activity are known in the art and are described, for example, by H. Neurath and R. L. Hill, 1979, In, The Proteins, Academic Press, New York. The most commonly occurring exchanges are Ala/Ser, Val/Ile, Asp/Glu, Thr/Ser, Ala/Gly, Ala/Thr, Ser/Asn, Ala/Val, Ser/Gly, Tyr/Phe, Ala/Pro, Lys/Arg, Asp/Asn, Leu/Ile, Leu/Val, Ala/Glu, and Asp/Gly.

[0082] Alternatively, the amino acid changes are of such a nature that the physico-chemical properties of the polypeptides are altered. For example, amino acid changes may improve the thermal stability of the aminotransferase, alter the substrate specificity, change the pH optimum, and the like.

[0083] Essential amino acids can be identified according to procedures known in the art, such as site-directed mutagenesis or alanine-scanning mutagenesis (Cunningham and Wells, 1989, Science 244: 1081-1085). In the latter technique, single alanine mutations are introduced at every residue in the molecule, and the resultant mutant molecules are tested for aminotransferase activity to identify amino acid residues that are critical to the activity of the molecule. See also, Hilton et al., 1996, J. Biol. Chem. 271: 4699-4708. The active site of the aminotransferase or other biological interaction can also be determined by physical analysis of structure, as determined by such techniques as nuclear magnetic resonance, crystallography, electron diffraction, or photoaffinity labeling, in conjunction with mutation of putative contact site amino acids. See, for example, de Vos et al., 1992, Science 255: 306-312; Smith et al., 1992, J. Mol. Biol. 224: 899-904; Wlodaver et al., 1992, FEBS Lett. 309: 59-64. The identities of essential amino acids can also be inferred from analysis of identities with other aminotransferases that are related to the referenced aminotransferase.

[0084] Additional guidance on the structure-activity relationship of the aminotransferases herein can be determined using multiple sequence alignment (MSA) techniques well-known in the art. Based on the teachings herein, the skilled artisan could make similar alignments with any number of aminotransferases described herein or known in the art. Such alignments aid the skilled artisan to determine potentially relevant domains (e.g., binding domains or catalytic domains), as well as which amino acid residues are conserved and not conserved among the different aminotransferase sequences. It is appreciated in the art that changing an amino acid that is conserved at a particular position between the disclosed aminotransferases will more likely result in a change in biological activity (Bowie et al., 1990, Science 247: 1306-1310: “Residues that are directly involved in protein functions such as binding or catalysis will certainly be among the most conserved”). In contrast, substituting an amino acid that is not highly conserved among the aminotransferases will not likely or significantly alter the biological activity.

[0085] Single or multiple amino acid substitutions, deletions, and/or insertions can be made and tested using known methods of mutagenesis, recombination, and/or shuffling, followed by a relevant screening procedure, such as those disclosed by Reidhaar-Olson and Sauer, 1988, Science 241: 53-57; Bowie and Sauer, 1989, Proc. Natl. Acad. Sci. USA 86: 2152-2156; WO 95/17413; or WO 95/22625. Other methods that can be used include error-prone PCR, phage display (e.g., Lowman et al., 1991, Biochemistry 30: 10832-10837; U.S. Pat. No. 5,223,409; WO 92/06204), and region-directed mutagenesis (Derbyshire et al., 1986, Gene 46: 145; Ner et al., 1988, DNA 7: 127).

[0086] Mutagenesis/shuffling methods can be combined with high-throughput, automated screening methods to detect activity of cloned, mutagenized polypeptides expressed by host cells (Ness et al., 1999, Nature Biotechnology 17: 893-896). Mutagenized DNA molecules that encode active aminotransferases can be recovered from the host cells and rapidly sequenced using standard methods in the art. These methods allow the rapid determination of the importance of individual amino acid residues in a polypeptide.

[0087] In another embodiment, the heterologous polynucleotide encoding the aminotransferase (e.g., BAAT comprising the (A,C)-Xn-(GSLS)-Xn-SKA(L/l)(L/l) motif) comprises a coding sequence having at least 60%, e.g., at least 65%, at least 70%, at least 75%, at least 80%, at least 85%, at least 90%, at least 95%, at least 96%, at least 97%, at least 98%, at least 99%, or 100% sequence identity to SEQ ID NO: 239. In one embodiment, the heterologous polynucleotide encoding the aminotransferase comprises the coding sequence of SEQ ID NO: 239.

[0088] In another embodiment, the heterologous polynucleotide encoding the aminotransferase (e.g., BAAT comprising the (A,C)-Xn-(GSLS)-Xn-SKA(L/l)(L/l) motif) comprises a coding sequence having at least 60%, e.g., at least 65%, at least 70%, at least 75%, at least 80%, at least 85%, at least 90%, at least 95%, at least 96%, at least 97%, at least 98%, at least 99%, or 100% sequence identity to SEQ ID NO: 240. In one embodiment, the heterologous polynucleotide encoding the aminotransferase comprises the coding sequence of SEQ ID NO: 240.

[0089] In another embodiment, the heterologous polynucleotide encoding the aminotransferase (e.g., BAAT comprising the (A,C)-Xn-(GSLS)-Xn-SKA(L/l)(L/l) motif) comprises a coding sequence having at least 60%, e.g., at least 65%, at least 70%, at least 75%, at least 80%, at least 85%, at least 90%, at least 95%, at least 96%, at least 97%, at least 98%, at least 99%, or 100% sequence identity to SEQ ID NO: 241. In one embodiment, the heterologous polynucleotide encoding the aminotransferase comprises the coding sequence of SEQ ID NO: 241.

[0090] In another embodiment, the heterologous polynucleotide encoding the aminotransferase (e.g., BAAT comprising the (A,C)-Xn-(GSLS)-Xn-SKA(L/l)(L/l) motif) comprises a coding sequence having at least 60%, e.g., at least 65%, at least 70%, at least 75%, at least 80%, at least 85%, at least 90%, at least 95%, at least 96%, at least 97%, at least 98%, at least 99%, or 100% sequence identity to SEQ ID NO: 242. In one embodiment, the heterologous polynucleotide encoding the aminotransferase comprises the coding sequence of SEQ ID NO: 242.

[0091] In another embodiment, the heterologous polynucleotide encoding the aminotransferase (e.g., BAAT comprising the (A,C)-Xn-(GSLS)-Xn-SKA(L/l)(L/l) motif) comprises a coding sequence having at least 60%, e.g., at least 65%, at least 70%, at least 75%, at least 80%, at least 85%, at least 90%, at least 95%, at least 96%, at least 97%, at least 98%, at least 99%, or 100% sequence identity to SEQ ID NO: 243. In one embodiment, the heterologous polynucleotide encoding the aminotransferase comprises the coding sequence of SEQ ID NO: 243.

[0092] In another embodiment, the heterologous polynucleotide encoding the aminotransferase (e.g., BAAT comprising the (A,C)-Xn-(GSLS)-Xn-SKA(L/l)(L/l) motif) comprises a coding sequence having at least 60%, e.g., at least 65%, at least 70%, at least 75%, at least 80%, at least 85%, at least 90%, at least 95%, at least 96%, at least 97%, at least 98%, at least 99%, or 100% sequence identity to SEQ ID NO: 244. In one embodiment, the heterologous polynucleotide encoding the aminotransferase comprises the coding sequence of SEQ ID NO: 244.

[0093] In another embodiment, the heterologous polynucleotide encoding the aminotransferase (e.g., BAAT comprising the (A,C)-Xn-(GSLS)-Xn-SKA(L/l)(L/l) motif) comprises a coding sequence having at least 60%, e.g., at least 65%, at least 70%, at least 75%, at least 80%, at least 85%, at least 90%, at least 95%, at least 96%, at least 97%, at least 98%, at least 99%, or 100% sequence identity to SEQ ID NO: 245. In one embodiment, the heterologous polynucleotide encoding the aminotransferase comprises the coding sequence of SEQ ID NO: 245.

[0094] In another embodiment, In another embodiment, the heterologous polynucleotide encoding the aminotransferase (e.g., BAAT comprising the (A,C)-Xn-(GSLS)-Xn-SKA(L/l)(L/l) motif) comprises a coding sequence having at least 60%, e.g., at least 65%, at least 70%, at least 75%, at least 80%, at least 85%, at least 90%, at least 95%, at least 96%, at least 97%, at least 98%, at least 99%, or 100% sequence identity to SEQ ID NO: 246. In one embodiment, the heterologous polynucleotide encoding the aminotransferase comprises the coding sequence of SEQ ID NO: 246.

[0095] In another embodiment, the heterologous polynucleotide encoding the aminotransferase (e.g., BAAT comprising the (A,C)-Xn-(GSLS)-Xn-SKA(L/l)(L/l) motif) comprises a coding sequence having at least 60%, e.g., at least 65%, at least 70%, at least 75%, at least 80%, at least 85%, at least 90%, at least 95%, at least 96%, at least 97%, at least 98%, at least 99%, or 100% sequence identity to SEQ ID NO: 247. In one embodiment, the heterologous polynucleotide encoding the aminotransferase comprises the coding sequence of SEQ ID NO: 247.

[0096] In another embodiment, the heterologous polynucleotide encoding the aminotransferase (e.g., BAAT comprising the (A,C)-Xn-(GSLS)-Xn-SKA(L/l)(L/l) motif) comprises a coding sequence having at least 60%, e.g., at least 65%, at least 70%, at least 75%, at least 80%, at least 85%, at least 90%, at least 95%, at least 96%, at least 97%, at least 98%, at least 99%, or 100% sequence identity to SEQ ID NO: 248. In one embodiment, the heterologous polynucleotide encoding the aminotransferase comprises the coding sequence of SEQ ID NO: 248.

[0097] In another embodiment, the heterologous polynucleotide encoding the aminotransferase (e.g., BAAT comprising the (A,C)-Xn-(GSLS)-Xn-SKA(L/l)(L/l) motif) comprises a coding sequence having at least 60%, e.g., at least 65%, at least 70%, at least 75%, at least 80%, at least 85%, at least 90%, at least 95%, at least 96%, at least 97%, at least 98%, at least 99%, or 100% sequence identity to SEQ ID NO: 249. In one embodiment, the heterologous polynucleotide encoding the aminotransferase comprises the coding sequence of SEQ ID NO: 249.

[0098] In another embodiment, the heterologous polynucleotide encoding the aminotransferase (e.g., BAAT comprising the (A,C)-Xn-(GSLS)-Xn-SKA(L/l)(L/l) motif) comprises a coding sequence having at least 60%, e.g., at least 65%, at least 70%, at least 75%, at least 80%, at least 85%, at least 90%, at least 95%, at least 96%, at least 97%, at least 98%, at least 99%, or 100% sequence identity to SEQ ID NO: 250. In one embodiment, the heterologous polynucleotide encoding the aminotransferase comprises the coding sequence of SEQ ID NO: 250.

[0099] In another embodiment, the heterologous polynucleotide encoding the aminotransferase (e.g., BAAT comprising the (A,C)-Xn-(GSLS)-Xn-SKA(L/l)(L/l) motif) comprises a coding sequence having at least 60%, e.g., at least 65%, at least 70%, at least 75%, at least 80%, at least 85%, at least 90%, at least 95%, at least 96%, at least 97%, at least 98%, at least 99%, or 100% sequence identity to SEQ ID NO: 251. In one embodiment, the heterologous polynucleotide encoding the aminotransferase comprises the coding sequence of SEQ ID NO: 251.

[0100] In another embodiment, the heterologous polynucleotide encoding the aminotransferase (e.g., BAAT comprising the (A,C)-Xn-(GSLS)-Xn-SKA(L/l)(L/l) motif) comprises a subsequence of the coding sequence of SEQ ID NO: 239, SEQ ID NO: 240, SEQ ID NO: 241, SEQ ID NO: 242, SEQ ID NO: 243, SEQ ID NO: 244, SEQ ID NO: 245, SEQ ID NO: 246, SEQ ID NO: 247, SEQ ID NO: 248, SEQ ID NO: 249, SEQ ID NO: 250, or SEQ ID NO: 251, wherein the subsequence encodes a polypeptide having aminotransferase activity (e.g., BAAT activity). In another embodiment, the number of nucleotides residues in the coding subsequence is at least 75%, e.g., at least 80%, 85%, 90%, or 95% of the number of the referenced coding sequence.

[0101] The referenced coding sequence of any related aspect or embodiment described herein can be the native coding sequence or a degenerate sequence, such as a codon-optimized coding sequence designed for a particular host cell.

[0102] The aminotransferase coding sequence, or a subsequence thereof, (e.g., the subsequence encoding the (A,C)-Xn-(GSLS)-Xn-SKA(L/l)(L/l) motif) as well as the aminotransferase polypeptide, or a fragment thereof (e.g., the (A,C)-Xn-(GSLS)-Xn-SKA(L/l)(L/l) motif), may be used to design nucleic acid probes to identify and clone DNA encoding a parent from strains of different genera or species according to methods well known in the art. In particular, such probes can be used for hybridization with the genomic DNA or cDNA of a cell of interest, following standard Southern blotting procedures, in order to identify and isolate the corresponding gene therein. Such probes can be considerably shorter than the entire sequence, but should be at least 15, e.g., at least 25, at least 35, or at least 70 nucleotides in length. Preferably, the nucleic acid probe is at least 100 nucleotides in length, e.g., at least 200 nucleotides, at least 300 nucleotides, at least 400 nucleotides, at least 500 nucleotides, at least 600 nucleotides, at least 700 nucleotides, at least 800 nucleotides, or at least 900 nucleotides in length. Both DNA and RNA probes can be used. The probes are typically labeled for detecting the corresponding gene (for example, with ³²P, ³H, ³⁵S, biotin, or avidin).

[0103] A genomic DNA or cDNA library prepared from such other strains may be screened for DNA that hybridizes with the probes described above and encodes a parent. Genomic or other DNA from such other strains may be separated by agarose or polyacrylamide gel electrophoresis, or other separation techniques. DNA from the libraries or the separated DNA may be transferred to and immobilized on nitrocellulose or other suitable carrier material. In order to identify a clone or DNA that hybridizes with the aminotransferase coding sequence, or a subsequence thereof, the carrier material is used in a Southern blot.

[0104] In one aspect, the nucleic acid probe is a polynucleotide comprising SEQ ID NO: 239, SEQ ID NO: 240, SEQ ID NO: 241, SEQ ID NO: 242, SEQ ID NO: 243, SEQ ID NO: 244, SEQ ID NO: 245, SEQ ID NO: 246, SEQ ID NO: 247, SEQ ID NO: 248, SEQ ID NO: 249, SEQ ID NO: 250, or SEQ ID NO: 251; or a subsequence thereof. In another aspect, the nucleic acid probe is a polynucleotide that encodes the polypeptide of SEQ ID NO: 206, SEQ ID NO: 207, SEQ ID NO: 208, SEQ ID NO: 209, SEQ ID NO: 218, SEQ ID NO: 220, SEQ ID NO: 222, SEQ ID NO: 224, SEQ ID NO: 226, SEQ ID NO: 228, SEQ ID NO: 230, SEQ ID NO: 232, or SEQ ID NO: 234; or a fragment thereof.

[0105] For purposes of the probes described above, hybridization indicates that the polynucleotide hybridizes to a labeled nucleic acid probe, or the full-length complementary strand thereof, or a subsequence of the foregoing; under very low to very high stringency conditions. Molecules to which the nucleic acid probe hybridizes under these conditions can be detected using, for example, X-ray film. Stringency and washing conditions are defined as described supra.

[0106] In one embodiment, the aminotransferase (e.g., BAAT) is encoded by a polynucleotide that hybridizes under at least low stringency conditions, e.g., medium stringency conditions, medium-high stringency conditions, high stringency conditions, or very high stringency conditions with the full-length complementary strand of SEQ ID NO: 239. (Sambrook et al., 1989, Molecular Cloning, A Laboratory Manual, 2d edition, Cold Spring Harbor, N.Y.).

[0107] In another aspect, the aminotransferase (e.g., BAAT) is encoded by a polynucleotide that hybridizes under at least low stringency conditions, e.g., medium stringency conditions, medium-high stringency conditions, high stringency conditions, or very high stringency conditions with the full-length complementary strand of SEQ ID NO: 240.

[0108] In another aspect, the aminotransferase (e.g., BAAT) is encoded by a polynucleotide that hybridizes under at least low stringency conditions, e.g., medium stringency conditions, medium-high stringency conditions, high stringency conditions, or very high stringency conditions with the full-length complementary strand of SEQ ID NO: 241.

[0109] In another aspect, the aminotransferase (e.g., BAAT) is encoded by a polynucleotide that hybridizes under at least low stringency conditions, e.g., medium stringency conditions, medium-high stringency conditions, high stringency conditions, or very high stringency conditions with the full-length complementary strand of SEQ ID NO: 242.

[0110] In another aspect, the aminotransferase (e.g., BAAT) is encoded by a polynucleotide that hybridizes under at least low stringency conditions, e.g., medium stringency conditions, medium-high stringency conditions, high stringency conditions, or very high stringency conditions with the full-length complementary strand of SEQ ID NO: 243.

[0111] In another aspect, the aminotransferase (e.g., BAAT) is encoded by a polynucleotide that hybridizes under at least low stringency conditions, e.g., medium stringency conditions, medium-high stringency conditions, high stringency conditions, or very high stringency conditions with the full-length complementary strand of SEQ ID NO: 244.

[0112] In another aspect, the aminotransferase (e.g., BAAT) is encoded by a polynucleotide that hybridizes under at least low stringency conditions, e.g., medium stringency conditions, medium-high stringency conditions, high stringency conditions, or very high stringency conditions with the full-length complementary strand of SEQ ID NO: 245.

[0113] In another aspect, the aminotransferase (e.g., BAAT) is encoded by a polynucleotide that hybridizes under at least low stringency conditions, e.g., medium stringency conditions, medium-high stringency conditions, high stringency conditions, or very high stringency conditions with the full-length complementary strand of SEQ ID NO: 246.

[0114] In another aspect, the aminotransferase (e.g., BAAT) is encoded by a polynucleotide that hybridizes under at least low stringency conditions, e.g., medium stringency conditions, medium-high stringency conditions, high stringency conditions, or very high stringency conditions with the full-length complementary strand of SEQ ID NO: 247.

[0115] In another aspect, the aminotransferase (e.g., BAAT) is encoded by a polynucleotide that hybridizes under at least low stringency conditions, e.g., medium stringency conditions, medium-high stringency conditions, high stringency conditions, or very high stringency conditions with the full-length complementary strand of SEQ ID NO: 248.

[0116] In another aspect, the aminotransferase (e.g., BAAT) is encoded by a polynucleotide that hybridizes under at least low stringency conditions, e.g., medium stringency conditions, medium-high stringency conditions, high stringency conditions, or very high stringency conditions with the full-length complementary strand of SEQ ID NO: 249.

[0117] In another aspect, the aminotransferase (e.g., BAAT) is encoded by a polynucleotide that hybridizes under at least low stringency conditions, e.g., medium stringency conditions, medium-high stringency conditions, high stringency conditions, or very high stringency conditions with the full-length complementary strand of SEQ ID NO: 250.

[0118] In another aspect, the aminotransferase (e.g., BAAT) is encoded by a polynucleotide that hybridizes under at least low stringency conditions, e.g., medium stringency conditions, medium-high stringency conditions, high stringency conditions, or very high stringency conditions with the full-length complementary strand of SEQ ID NO: 251.

[0119] The aminotransferase (e.g., BAAT) may be obtained from microorganisms of any suitable genus, including those readily available within the UniProtKB database (www.uniprot.org).

[0120] The aminotransferase (e.g., BAAT comprising the (A,C)-Xn-(GSLS)-Xn-SKA(L/l)(L/l) motif) may be a bacterial aminotransferase. For example, the aminotransferase may be a Gram-positive bacterial polypeptide such as a Bacillus, Clostridium, Enterococcus, Geobacillus, Lactobacillus, Lactococcus, Oceanobacillus, Staphylococcus, Streptococcus, or Streptomyces aminotransferase, or a Gram-negative bacterial polypeptide such as a Campylobacter, E. coli, Flavobacterium, Fusobacterium, Helicobacter, Ilyobacter, Neisseria, Pseudomonas, Salmonella, or Ureaplasma aminotransferase.

[0121] In one embodiment, the aminotransferase (e.g., BAAT comprising the (A,C)-Xn-(GSLS)-Xn-SKA(L/l)(L/l) motif) is a Bacillus alkalophilus, Bacillus amyloliquefaciens, Bacillus brevis, Bacillus circulans, Bacillus clausii, Bacillus coagulans, Bacillus firmus, Bacillus lautus, Bacillus lentus, Bacillus licheniformis, Bacillus megaterium, Bacillus pumilus, Bacillus stearothermophilus, Bacillus subtilis, or Bacillus thuringiensis aminotransferase.

[0122] In another embodiment, the aminotransferase (e.g., BAAT comprising the (A,C)-Xn-(GSLS)-Xn-SKA(L/l)(L/l) motif) is a Streptococcus equisimilis, Streptococcus pyogenes, Streptococcus uberis, or Streptococcus equi subsp. Zooepidemicus aminotransferase.

[0123] In another embodiment, the aminotransferase (e.g., BAAT comprising the (A,C)-Xn-(GSLS)-Xn-SKA(L/l)(L/l) motif) is a Streptomyces achromogenes, Streptomyces avermitilis, Streptomyces coelicolor, Streptomyces griseus, or Streptomyces lividans aminotransferase.

[0124] The aminotransferase (e.g., BAAT comprising the (A,C)-Xn-(GSLS)-Xn-SKA(L/l)(L/l) motif) may be a fungal aminotransferase. For example, the aminotransferase may be a yeast aminotransferase such as a Candida, Kluyveromyces, Pichia, Saccharomyces, Schizosaccharomyces, Yarrowia or Issatchenkia aminotransferase or a filamentous fungal aminotransferase such as an Acremonium, Agaricus, Alternaria, Aspergillus, Aureobasidium, Botryosphaeria, Ceriporiopsis, Chaetomidium, Chrysosporium, Claviceps, Cochliobolus, Coprinopsis, Coptotermes, Corynascus, Cryphonectria, Cryptococcus, Diplodia, Exidia, Filibasidium, Fusarium, Gibberella, Holomastigotoides, Humicola, Irpex, Lentinula, Leptospaeria, Magnaporthe, Melanocarpus, Meripilus, Mucor, Myceliophthora, Neocallimastix, Neurospora, Paecilomyces, Penicillium, Phanerochaete, Piromyces, Poitrasia, Pseudoplectania, Pseudotrichonympha, Rhizomucor, Schizophyllum, Scytalidium, Talaromyces, Thermoascus, Thielavia, Tolypocladium, Trichoderma, Trichophaea, Verticillium, Volvariella, or Xylaria aminotransferase.

[0125] In another embodiment, the aminotransferase (e.g., BAAT comprising the (A,C)-Xn-(GSLS)-Xn-SKA(L/l)(L/l) motif) is a Saccharomyces carlsbergensis, Saccharomyces cerevisiae, Saccharomyces diastaticus, Saccharomyces douglasii, Saccharomyces kluyveri, Saccharomyces norbensis, or Saccharomyces oviformis aminotransferase

[0126] In another embodiment, the aminotransferase (e.g., BAAT comprising the (A,C)-Xn-(GSLS)-Xn-SKA(L/l)(L/l) motif) is an Acremonium cellulolyticus, Aspergillus aculeatus, Aspergillus awamori, Aspergillus foetidus, Aspergillus fumigatus, Aspergillus japonicus, Aspergillus nidulans, Aspergillus niger, Aspergillus oryzae, Chrysosporium inops, Chrysosporium keratinophilum, Chrysosporium lucknowense, Chrysosporium merdarium, Chrysosporium pannicola, Chrysosporium queenslandicum, Chrysosporium tropicum, Chrysosporium zonatum, Fusarium bactridioides, Fusarium cerealis, Fusarium crookwellense, Fusarium culmorum, Fusarium graminearum, Fusarium graminum, Fusarium heterosporum, Fusarium negundi, Fusarium oxysporum, Fusarium reticulatum, Fusarium roseum, Fusarium sambucinum, Fusarium sarcochroum, Fusarium sporotrichioides, Fusarium sulphureum, Fusarium torulosum, Fusarium trichothecioides, Fusarium venenatum, Humicola grisea, Humicola insolens, Humicolalanuginosa, Irpex lacteus, Mucor miehei, Myceliophthora thermophila, Neurospora crassa, Penicillium funiculosum, Penicillium purpurogenum, Phanerochaete chrysosporium, Thielavia achromatica, Thielavia albomyces, Thielavia albopilosa, Thielavia australeinsis, Thielavia fimeti, Thielavia microspora, Thielavia ovispora, Thielavia peruviana, Thielavia setosa, Thielavia spededonium, Thielavia subthermophila, Thielavia terrestris, Trichoderma harzianum, Trichoderma koningii, Trichoderma longibrachiatum, Trichoderma reesei, or Trichoderma viride aminotransferase.

[0127] In one aspect, the aminotransferase (e.g., BAAT comprising the (A,C)-Xn-(GSLS)-Xn-SKA(L/l)(L/l) motif) is from Pichia, such as the Pichia membranifaciens aminotransferase of SEQ ID NO: 206, or the Pichia farinosa aminotransferase of SEQ ID NO: 234.

[0128] In another aspect, the aminotransferase (e.g., BAAT comprising the (A,C)-Xn-(GSLS)-Xn-SKA(L/l)(L/l) motif) is from Candida, such as the Candida arabinofermentans aminotransferase of SEQ ID NO: 207, the Candida guilliermondii aminotransferase of SEQ ID NO: 209, the Candida parapsilosis aminotransferase of SEQ ID NO: 218, the Candida lusitaniae aminotransferase of SEQ ID NO: 224, the Candida albicans aminotransferase of SEQ ID NO: 226, or the Candida tropicalis aminotransferase of SEQ ID NO: 230.

[0129] In another aspect, the aminotransferase (e.g., BAAT comprising the (A,C)-Xn-(GSLS)-Xn-SKA(L/l)(L/l) motif) is from Brettanomyces, such as the Brettanomyces bruxellensis aminotransferase of SEQ ID NO: 208.

[0130] In another aspect, the aminotransferase (e.g., BAAT comprising the (A,C)-Xn-(GSLS)-Xn-SKA(L/l)(L/l) motif) is from Scheffersomyces, such as the Scheffersomyces stipitis aminotransferase of SEQ ID NO: 220.

[0131] In another aspect, the aminotransferase (e.g., BAAT comprising the (A,C)-Xn-(GSLS)-Xn-SKA(L/l)(L/l) motif) is from Lodderomyces, such as the Lodderomyces elongisporus aminotransferase of SEQ ID NO: 222.

[0132] In another aspect, the aminotransferase (e.g., BAAT comprising the (A,C)-Xn-(GSLS)-Xn-SKA(L/l)(L/l) motif) is from Debaryomyces, such as the Debaryomyces hansenii aminotransferase of SEQ ID NO: 228.

[0133] In another aspect, the aminotransferase (e.g., BAAT comprising the (A,C)-Xn-(GSLS)-Xn-SKA(L/l)(L/l) motif) is from, such as the Kuraishia capsulata aminotransferase of SEQ ID NO: 232.

[0134] It will be understood that for the aforementioned species, the invention encompasses both the perfect and imperfect states, and other taxonomic equivalents, e.g., anamorphs, regardless of the species name by which they are known. Those skilled in the art will readily recognize the identity of appropriate equivalents.

[0135] Strains of these species are readily accessible to the public in a number of culture collections, such as the American Type Culture Collection (ATCC), Deutsche Sammlung von Mikroorganismen and Zellkulturen GmbH (DSMZ), Centraalbureau Voor Schimmelcultures (CBS), and Agricultural Research Service Patent Culture Collection, Northern Regional Research Center (NRRL).

[0136] The aminotransferases (e.g., BAAT comprising the (A,C)-Xn-(GSLS)-Xn-SKA(L/l)(L/l) motif) may also be identified and obtained from other sources including microorganisms isolated from nature (e.g., soil, composts, water, silage, etc.) or DNA samples obtained directly from natural materials (e.g., soil, composts, water, silage, etc.) using the above-mentioned probes. Techniques for isolating microorganisms and DNA directly from natural habitats are well known in the art. The polynucleotide encoding a aminotransferase may then be derived by similarly screening a genomic or cDNA library of another microorganism or mixed DNA sample.

[0137] Once a polynucleotide encoding a aminotransferase (e.g., BAAT comprising the (A,C)-Xn-(GSLS)-Xn-SKA(L/l)(L/l) motif) has been detected with a suitable probe as described herein, the sequence may be isolated or cloned by utilizing techniques that are known to those of ordinary skill in the art (see, e.g., Sambrook et al., 1989, supra). Techniques used to isolate or clone polynucleotides encoding aminotransferases include isolation from genomic DNA, preparation from cDNA, or a combination thereof. The cloning of the polynucleotides from such genomic DNA can be effected, e.g., by using the well-known polymerase chain reaction (PCR) or antibody screening of expression libraries to detect cloned DNA fragments with shares structural features. See, e.g., Innis et al., 1990, PCR: A Guide to Methods and Application, Academic Press, New York. Other nucleic acid amplification procedures such as ligase chain reaction (LCR), ligated activated transcription (LAT) and nucleotide sequence-based amplification (NASBA) may be used.

[0138] The aminotransferase (e.g., BAAT comprising the (A,C)-Xn-(GSLS)-Xn-SKA(L/l)(L/l) motif) may be a fused polypeptide or cleavable fusion polypeptide in which another polypeptide is fused at the N-terminus or the C-terminus of the aminotransferase. A fused polypeptide may be produced by fusing a polynucleotide encoding another polypeptide to a polynucleotide encoding the aminotransferase. Techniques for producing fusion polypeptides are known in the art, and include ligating the coding sequences encoding the polypeptides so that they are in frame and that expression of the fused polypeptide is under control of the same promoter(s) and terminator. Fusion proteins may also be constructed using intein technology in which fusions are created post-translationally (Cooper et al., 1993, EMBO J. 12: 2575-2583; Dawson et al., 1994, Science 266: 776-779).

### Hosts, Expression Vectors and Nucleic Acid Constructs

[0139] The recombinant cells described herein may be selected from any host cell capable of having an active 3-HP pathway. Those skilled in the art will understand that the genetic alterations, including metabolic modifications exemplified herein, may be described with reference to a suitable host organism and their corresponding metabolic reactions or a suitable source organism for desired genetic material such as genes for a desired metabolic pathway. However, given the complete genome sequencing of a wide variety of organisms and the high level of skill in the area of genomics, those skilled in the art can apply the teachings and guidance provided herein to other organisms. For example, the metabolic alterations exemplified herein can readily be applied to other species by incorporating the same or analogous encoding nucleic acid from species other than the referenced species. In some embodiments, the host cells are isolated.

[0140] The recombinant host cell may be any Gram-positive or Gram-negative bacterium. Gram-positive bacteria include, but are not limited to, Bacillus, Clostridium, Enterococcus, Geobacillus, Lactobacillus, Lactococcus, Oceanobacillus, Staphylococcus, Streptococcus, and Streptomyces. Gram-negative bacteria include, but are not limited to, Campylobacter, E. coli, Flavobacterium, Fusobacterium, Helicobacter, Ilyobacter, Neisseria, Pseudomonas, Salmonella, and Ureaplasma.

[0141] The bacterial host cell may be any Bacillus cell including, but not limited to, Bacillus alkalophilus, Bacillus amyloliquefaciens, Bacillus brevis, Bacillus circulans, Bacillus clausii, Bacillus coagulans, Bacillus firmus, Bacillus lautus, Bacillus lentus, Bacillus licheniformis, Bacillus megaterium, Bacillus pumilus, Bacillus stearothermophilus, Bacillus subtilis, and Bacillus thuringiensis cells.

[0142] The bacterial host cell may also be any Streptococcus cell including, but not limited to, Streptococcus equisimilis, Streptococcus pyogenes, Streptococcus uberis, and Streptococcus equi subsp. Zooepidemicus cells.

[0143] The bacterial host cell may also be any Streptomyces cell, including, but not limited to, Streptomyces achromogenes, Streptomyces avermitilis, Streptomyces coelicolor, Streptomyces griseus, and Streptomyces lividans cells.

[0144] The introduction of DNA into a Bacillus cell may be effected by protoplast transformation (see, e.g., Chang and Cohen, 1979, Mol. Gen. Genet. 168: 111-115), competent cell transformation (see, e.g., Young and Spizizen, 1961, J. Bacteriol. 81: 823-829, or Dubnau and Davidoff-Abelson, 1971, J. Mol. Biol. 56: 209-221), electroporation (see, e.g., Shigekawa and Dower, 1988, Biotechniques 6: 742-751), or conjugation (see, e.g., Koehler and Thorne, 1987, J. Bacteriol. 169: 5271-5278). The introduction of DNA into an E. coli cell may be effected by protoplast transformation (see, e.g., Hanahan, 1983, J. Mol. Biol. 166: 557-580) or electroporation (see, e.g., Dower et al., 1988, Nucleic Acids Res. 16: 6127-6145). The introduction of DNA into a Streptomyces cell may be effected by protoplast transformation, electroporation (see, e.g., Gong et al., 2004, Folia Microbiol. (Praha) 49: 399-405), conjugation (see, e.g., Mazodier et al., 1989, J. Bacteriol. 171: 3583-3585), or transduction (see, e.g., Burke et al., 2001, Proc. Natl. Acad. Sci. USA 98: 6289-6294). The introduction of DNA into a Pseudomonas cell may be effected by electroporation (see, e.g., Choi et al., 2006, J. Microbiol. Methods 64: 391-397), or conjugation (see, e.g., Pinedo and Smets, 2005, Appl. Environ. Microbiol. 71: 51-57). The introduction of DNA into a Streptococcus cell may be effected by natural competence (see, e.g., Perry and Kuramitsu, 1981, Infect. Immun. 32: 1295-1297), protoplast transformation (see, e.g., Catt and Jollick, 1991, Microbios 68: 189-207), electroporation (see, e.g., Buckley et al., 1999, Appl. Environ. Microbiol. 65: 3800-3804) or conjugation (see, e.g., Clewell, 1981, Microbiol. Rev. 45: 409-436). However, any method known in the art for introducing DNA into a host cell can be used.

[0145] The recombinant host cell may also be a eukaryote, such as a mammalian, insect, plant, or fungal cell.

[0146] “Fungi” as used herein includes the phyla Ascomycota, Basidiomycota, Chytridiomycota, and Zygomycota as well as the Oomycota and all mitosporic fungi (as defined by Hawksworth et al., In, Ainsworth and Bisby's Dictionary of The Fungi, 8th edition, 1995, CAB International, University Press, Cambridge, UK).

[0147] In one embodiment, the host cell is a yeast cell. “Yeast” as used herein includes ascosporogenous yeast (Endomycetales), basidiosporogenous yeast, and yeast belonging to the Fungi Imperfecti (Blastomycetes). Since the classification of yeast may change in the future, for the purposes described herein, yeast shall be defined as described in Biology and Activities of Yeast (Skinner, F. A., Passmore, S. M., and Davenport, R. R., eds, Soc. App. Bacteriol. Symposium Series No. 9, 1980).

[0148] The yeast host cell may be a Candida, Hansenula, Issatchenkia, Kluyveromyces, Pichia, Saccharomyces, Schizosaccharomyces, or Yarrowia cell, such as a Candida sonorensis, Candida methanosorbosa, Candida ethanolica, Issatchenkia orientalis, Kluyveromyces lactis, Kluyveromyces marxianus, Pichia fermentans, Pichia galeiformis, Pichia membranifaciens, Pichia deserticola, Saccharomyces carlsbergensis, Saccharomyces cerevisiae, Saccharomyces diastaticus, Saccharomyces bulderi, Saccharomyces douglasii, Saccharomyces kluyveri, Saccharomyces norbensis, Saccharomyces oviformis, or Yarrowia lipolytica cell.

[0149] The yeast host cell may be a crabtree-positive phenotype or a crabtree-negative phenotype. Crabtree-negative organisms are characterized by the ability to be induced into an increased fermentative state. Both naturally occurring organisms and recombinant organisms can be characterized as Crabtree-negative. The Crabtree effect is defined as oxygen consumption inhibition in a microorganism when the microorganism is cultured under aerobic conditions in the presence of a high concentration of glucose (e.g. >5 mM glucose). Crabtree-positive organisms continue to ferment (rather than respire) irrespective of oxygen availability in the presence of glucose, while Crabtree-negative organisms do not exhibit glucose-mediated inhibition of oxygen consumption. This characteristic is useful for organic product synthesis, since it permits cells to be grown at high substrate concentrations but to retain the beneficial energetic effects of oxidative phosphorylation. In one aspect, the yeast has a crabtree-negative phenotype.

[0150] In certain embodiments the host yeast cell belongs to the genus Issatchenkia, Candida, or Saccharomyces, and in certain of these embodiments the host cell belongs to the Saccharomyces clade or the I. orientalis/P. fermentans clade. In certain of embodiments, the host cell is C. lambica, I. orientalis, or S. bulderi. In certain embodiments, the yeast cells are CNB1 yeast cells (as described in WO2012/074818, the content of which is incorporated herein by reference) and/or CB1 yeast cells. CB1 cells include CNB1 cells described in WO2012/074818 and any cell related to or derived from the CNB1 cells described therein.

[0151] The yeast host cell may be derived from a cell or engineered such that the cell has been genetically modified to produce high lactate or 3-HP titers, exhibit increased tolerance to acidic pH, exhibit increased tolerance to a fermentation product (e.g., lactate, 3-HP, ethanol or propanol), and/or display increased ability to ferment pentose sugars (yet, in some embodiments, the yeast cell is unable to ferment pentose sugars). Exemplary genetically modified yeast cells are described in WO00/71738, WO03/049525, WO03/102201, WO03/102152, WO02/42471, WO2007/032792, WO2007/106524, WO2007/117282, the content of which is hereby incorporated by reference with respect to said cells. The modification of any yeast cell described in the foregoing applications is contemplated with an active 3-HP pathway as described herein.

[0152] The host cell may have improved resistance to 3-HP. In certain embodiments, the host cells are “3-HP resistant yeast cells,” as described in US2012/0135481. In certain of these embodiments, the host cells may exhibit 3-HP resistance in their native form. In other embodiments, the cells may have undergone mutation and/or selection (e.g., chemostat selection or repeated serial subculturing) before, during, or after introduction of genetic modifications related to an active 3-HP pathway, such that the mutated and/or selected cells possess a higher degree of resistant to 3-HP than wild-type cells of the same species. For example, in some embodiments, the cells have undergone mutation and/or selection in the presence of 3-HP or lactic acid before or after being genetically modified with one or more heterologous 3-HP pathway genes. In certain embodiments, mutation and/or selection may be carried out on cells that exhibit 3-HP resistance in their native form. Cells that have undergone mutation and/or selection may be tested for sugar consumption and other characteristics in the presence of varying levels of 3-HP in order to determine their potential as industrial hosts for 3-HP production. In addition to 3-HP resistance, the host cells may have undergone mutation and/or selection for resistance to one or more additional organic acids (e.g., lactic acid) or to other fermentation products, byproducts, or media components. Selection, such as selection for resistance to 3-HP or to other compounds, may be accomplished using methods well known in the art (e.g., as described in US2012/0135481).

[0153] In one embodiment, the host cell is a filamentous fungal cell. “Filamentous fungi” include all filamentous forms of the subdivision Eumycota and Oomycota (as defined by Hawksworth et al., 1995, supra). The filamentous fungi are generally characterized by a mycelial wall composed of chitin, cellulose, glucan, chitosan, mannan, and other complex polysaccharides. Vegetative growth is by hyphal elongation and carbon catabolism is obligately aerobic. In contrast, vegetative growth by yeasts such as Saccharomyces cerevisiae is by budding of a unicellular thallus and carbon catabolism may be fermentative.

[0154] The filamentous fungal host cell may be an Acremonium, Aspergillus, Aureobasidium, Bjerkandera, Ceriporiopsis, Chrysosporium, Coprinus, Coriolus, Cryptococcus, Filibasidium, Fusarium, Humicola, Magnaporthe, Mucor, Myceliophthora, Neocallimastix, Neurospora, Paecilomyces, Penicillium, Phanerochaete, Phlebia, Piromyces, Pleurotus, Schizophyllum, Talaromyces, Thermoascus, Thielavia, Tolypocladium, Trametes, or Trichoderma cell.

[0155] For example, the filamentous fungal host cell may be an Aspergillus awamori, Aspergillus foetidus, Aspergillus fumigatus, Aspergillus japonicus, Aspergillus nidulans, Aspergillus niger, Aspergillus oryzae, Bjerkandera adusta, Ceriporiopsis aneirina, Ceriporiopsis caregiea, Ceriporiopsis gilvescens, Ceriporiopsis pannocinta, Ceriporiopsis rivulosa, Ceriporiopsis subrufa, Ceriporiopsis subvermispora, Chrysosporium inops, Chrysosporium keratinophilum, Chrysosporium lucknowense, Chrysosporium merdarium, Chrysosporium pannicola, Chrysosporium queenslandicum, Chrysosporium tropicum, Chrysosporium zonatum, Coprinus cinereus, Coriolus hirsutus, Fusarium bactridioides, Fusarium cerealis, Fusarium crookwellense, Fusarium culmorum, Fusarium graminearum, Fusarium graminum, Fusarium heterosporum, Fusarium negundi, Fusarium oxysporum, Fusarium reticulatum, Fusarium roseum, Fusarium sambucinum, Fusarium sarcochroum, Fusarium sporotrichioides, Fusarium sulphureum, Fusarium torulosum, Fusarium trichothecioides, Fusarium venenatum, Humicola insolens, Humicola lanuginosa, Mucor miehei, Myceliophthora thermophila, Neurospora crassa, Penicillium purpurogenum, Phanerochaete chrysosporium, Phlebia radiata, Pleurotus eryngii, Thielavia terrestris, Trametes villosa, Trametes versicolor, Trichoderma harzianum, Trichoderma koningii, Trichoderma longibrachiatum, Trichoderma reesei, or Trichoderma viride cell.

[0156] Fungal cells may be transformed by a process involving protoplast formation, transformation of the protoplasts, and regeneration of the cell wall in a manner known per se. Suitable procedures for transformation of Aspergillus and Trichoderma host cells are described in EP 238023, Yelton et al., 1984, Proc. Natl. Acad. Sci. USA 81: 1470-1474, and Christensen et al., 1988, Bio/Technology 6: 1419-1422. Suitable methods for transforming Fusarium species are described by Malardier et al., 1989, Gene 78: 147-156, and WO 96/00787. Yeast may be transformed using the procedures described by Becker and Guarente, In Abelson, J. N. and Simon, M. I., editors, Guide to Yeast Genetics and Molecular Biology, Methods in Enzymology, Volume 194, pp 182-187, Academic Press, Inc., New York; Ito et al., 1983, J. Bacteriol. 153: 163; and Hinnen et al., 1978, Proc. Natl. Acad. Sci. USA 75: 1920, or as described herein.

[0157] The ideal cell for organic acids, such 3-HP, is capable of growing at low pH levels. The ability to conduct fermentation at a low pH decreases downstream recovery costs, resulting in more economical production. Therefore, in certain embodiments the host cell is capable of growing at low pH levels (e.g., at pH levels less than 7, 6, 5, 4, or 3).

[0158] A suitable host cell may possess one or more favorable characteristics in addition to organic acid resistance and/or low pH growth capability. For example, potential host cells exhibiting acid resistance may be further selected based on glycolytic rates, specific growth rates, thermotolerance, tolerance to biomass hydrolysate inhibitors, overall process robustness, and so on. These criteria may be evaluated prior to any genetic modification relating to a metabolic pathway, or they may be evaluated after one or more such modifications have taken place.

[0159] In some aspects, the recombinant cell comprises one or more (e.g., two, several) heterologous polynucleotides of an active 3-HP pathway described herein (e.g., a heterologous polynucleotide encoding a PPC; a heterologous polynucleotide encoding a PYC; a heterologous polynucleotide encoding an AAT; a heterologous polynucleotide encoding an ADC; a heterologous polynucleotide encoding a BAAT or gabT; and/or a heterologous polynucleotide encoding a 3-HPDH), wherein the recombinant cell secretes (and/or is capable of secreting) an increased level of 3-HP compared to the host cell without the one or more heterologous polynucleotides of the active 3-HP pathway when cultivated under the same conditions. In some aspects (or the methods described herein), the recombinant cell secretes and/or is capable of secreting an increased level of 3-HP of at least 5%, e.g., at least 10%, at least 15%, at least 20%, at least 25%, at least 50%, at least 100%, at least 150%, at least 200%, at least 300%, or at 500% compared to the host cell without the one or more heterologous polynucleotides of the active 3-HP pathway, when cultivated under the same conditions. Examples of suitable cultivation conditions are described below and will be readily apparent to one of skill in the art based on the teachings herein.

[0160] In any of these aspects (or the methods described herein), the recombinant cell produces (and/or is capable of producing) a fermentation product, such 3-HP, at a yield of at least 10%, e.g., at least 20%, at least 30%, at least 40%, at least 50%, at least 60%, at least 70%, at least 80%, or at least 90%, of theoretical.

[0161] In any of these aspects (or the methods described herein), the recombinant cell may have a 3-HP volumetric productivity greater than about 0.1 g/L per hour, e.g., greater than about 0.2 g/L per hour, 0.5 g/L per hour, 0.6 g/L per hour, 0.7 g/L per hour, 0.8 g/L per hour, 0.9 g/L per hour, 1.0 g/L per hour, 1.1 g/L per hour, 1.2 g/L per hour, 1.3 g/L per hour, 1.5 g/L per hour, 1.75 g/L per hour, 2.0 g/L per hour, 2.25 g/L per hour, 2.5 g/L per hour, 2.75 g/L per hour, 3.0 g/L per hour, 3.25 g/L per hour, 3.5 g/L per hour, 3.75 g/L per hour, or 4.0 g/L per hour; or between about 0.1 g/L per hour and about 2.0 g/L per hour, e.g., between about 0.3 g/L per hour and about 1.7 g/L per hour, about 0.5 g/L per hour and about 1.5 g/L per hour, about 0.7 g/L per hour and about 1.3 g/L per hour, about 0.8 g/L per hour and about 1.2 g/L per hour, or about 0.9 g/L per hour and about 1.1 g/L per hour; or between about 0.1 g/L per hour and about 4.0 g/L per hour, e.g., between about 0.5 g/L per hour and about 3.75 g/L per hour, about 1.0 g/L per hour and about 3.5 g/L per hour, about 2.0 g/L per hour and about 3.25 g/L per hour.

[0162] In any of these aspects, the recombinant cell produces (and/or is capable of producing) a greater amount of 3-HP compared to the cell without the heterologous polynucleotide encoding the aminotransferase (e.g., BAAT comprising the (A,C)-Xn-(GSLS)-Xn-SKA(L/l)(L/l) motif) when cultivated under the same conditions. In some embodiments, the cell produces (and/or is capable of producing) at least 10% more (e.g., at least 15%, at least 20%, at least 25%, at least 30%, at least 35%, at least 40%, at least 45%, at least 50%, at least 75%, at least 100%, at least 200%, at least 300%, or at 500% more) 3-HP compared to the cell without the heterologous polynucleotide encoding the aminotransterase when cultivated under the same conditions.

[0163] In any of these aspects, the recombinant cell produces (and/or is capable of producing) a greater amount of 3-HP (e.g., at least 10% more, at least 15%, at least 20%, at least 25%, at least 30%, at least 35%, at least 40%, at least 45%, at least 50%, at least 75%, at least 100%, at least 200%, at least 300%, or at 500% more) compared to a second recombinant cell, when cultivated under identical conditions; wherein the second cell is identical to the recombinant cell with the proviso that the second cell encodes the BAAT of SEQ ID NO: 20 in place of the recombinant cell aminotransferase.

[0164] In some embodiments, the recombinant cells have an increased level of aminotransferase activity (e.g., BAAT activity) compared to the host cells without the heterologous polynucleotide encoding the aminotransferase, when cultivated under the same conditions. In other aspects, the cells have an increased level of aminotransferase activity of at least 5%, e.g., at least 10%, at least 15%, at least 20%, at least 25%, at least 50%, at least 100%, at least 150%, at least 200%, at least 300%, or at 500% compared to the host cells without the heterologous polynucleotide encoding aminotransferase, when cultivated under the same conditions.

[0165] The recombinant cells may be cultivated in a suitable nutrient medium using methods well known in the art. For example, the cell may be cultivated by shake flask cultivation, and small-scale or large-scale fermentation (including continuous, batch, fed-batch, or solid state fermentations) in laboratory or industrial fermentors performed in a suitable medium and under conditions allowing the desired polypeptide to be expressed and/or isolated. The cultivation takes place in a suitable nutrient medium comprising carbon and nitrogen sources and inorganic salts, as described herein, using procedures known in the art. Suitable media are available from commercial suppliers, may be prepared according to published compositions (e.g., in catalogues of the American Type Culture Collection), or may be prepared from commercially available ingredients.

[0166] The recombinant cells described herein also can be subjected to adaptive evolution to further augment product biosynthesis, including under conditions approaching theoretical maximum growth.

[0167] The recombinant cells described herein may utilize expression vectors comprising the coding sequence of one or more (e.g., two, several) heterologous 3-HP pathway genes linked to one or more control sequences that direct expression in a suitable cell under conditions compatible with the control sequence(s). Such expression vectors may be used in any of the cells and methods described herein. The polynucleotides described herein may be manipulated in a variety of ways to provide for expression of a desired polypeptide. Manipulation of the polynucleotide prior to its insertion into a vector may be desirable or necessary depending on the expression vector. The techniques for modifying polynucleotides utilizing recombinant DNA methods are well known in the art.

[0168] A construct or vector (or multiple constructs or vectors) comprising the one or more (e.g., two, several) heterologous 3-HP pathway genes may be introduced into a cell so that the construct or vector is maintained as a chromosomal integrant or as a self-replicating extra-chromosomal vector as described earlier.

[0169] The various nucleotide and control sequences may be joined together to produce a recombinant expression vector that may include one or more (e.g., two, several) convenient restriction sites to allow for insertion or substitution of the polynucleotide at such sites. Alternatively, the polynucleotide(s) may be expressed by inserting the polynucleotide(s) or a nucleic acid construct comprising the sequence into an appropriate vector for expression. In creating the expression vector, the coding sequence is located in the vector so that the coding sequence is operably linked with the appropriate control sequences for expression.

[0170] The recombinant expression vector may be any vector (e.g., a plasmid or virus) that can be conveniently subjected to recombinant DNA procedures and can bring about expression of the polynucleotide. The choice of the vector will typically depend on the compatibility of the vector with the host cell into which the vector is to be introduced. The vector may be a linear or closed circular plasmid.

[0171] In one aspect, the recombinant cell comprises a heterologous polynucleotide is contained in an independent vector. In one aspect, the recombinant cell comprises a plurality of heterologous polynucleotides each contained in an independent vector. In one aspect, the recombinant cell comprises at least two heterologous polynucleotides contained in a single vector. In one aspect, the recombinant cell comprises at least three of the heterologous polynucleotides contained on a single vector. In one aspect, the recombinant cell comprises at least four of the heterologous polynucleotides contained on a single vector. In one aspect, all the heterologous polynucleotides of the recombinant cell are contained on a single vector. Polynucleotides encoding heteromeric subunits of a protein complex may be contained in a single heterologous polynucleotide on a single vector or alternatively contained in separate heterologous polynucleotides on separate vectors.

[0172] The vector may be an autonomously replicating vector, i.e., a vector that exists as an extrachromosomal entity, the replication of which is independent of chromosomal replication, e.g., a plasmid, an extrachromosomal element, a minichromosome, or an artificial chromosome. The vector may contain any means for assuring self-replication. Alternatively, the vector may be one that, when introduced into the host cell, is integrated into the genome and replicated together with the chromosome(s) into which it has been integrated. Furthermore, a single vector or plasmid or two or more vectors or plasmids that together contain the total DNA to be introduced into the genome of the cell, or a transposon, may be used.

[0173] The expression vector may contain any suitable promoter sequence that is recognized by a cell for expression of a pyruvate reductase gene or any 3-HP pathway gene described herein. The promoter sequence contains transcriptional control sequences that mediate the expression of the polypeptide. The promoter may be any polynucleotide that shows transcriptional activity in the cell of choice including mutant, truncated, and hybrid promoters, and may be obtained from genes encoding extracellular or intracellular polypeptides either homologous or heterologous to the cell.

[0174] Each heterologous polynucleotide described herein may be operably linked to a promoter that is foreign to the polynucleotide. For example, in one aspect, the heterologous polynucleotide encoding the aminotransferase (e.g., BAAT comprising the (A,C)-Xn-(GSLS)-Xn-SKA(L/l)(L/l) motif) is operably linked to a promoter foreign to the polynucleotide. In another aspect, the heterologous polynucleotide encoding a polypeptide of a 3-HP pathway described herein (e.g., one or more of a PPC, PYC, AAT, ADC, BAAT, gabT, or 3-HPDH) is operably linked to promoter foreign to the polynucleotide. The promoters may be identical to or share a high degree of sequence identity (e.g., at least about 80%, at least about 85%, at least about 90%, at least about 95%, or at least about 99%) with a selected native promoter.

[0175] Examples of suitable promoters for directing transcription of the nucleic acid constructs of the present invention in a bacterial host cell are the promoters obtained from the Bacillus amyloliquefaciens alpha-amylase gene (amyQ), Bacillus licheniformis alpha-amylase gene (amyL), Bacillus licheniformis penicillinase gene (penP), Bacillus stearothermophilus maltogenic amylase gene (amyM), Bacillus subtilis levansucrase gene (sacB), Bacillus subtilis xylA and xylB genes, Bacillus thuringiensis cryIIIA gene (Agaisse and Lereclus, 1994, Molecular Microbiology 13: 97-107), E. coli lac operon, E. coli trc promoter (Egon et al., 1988, Gene 69: 301-315), Streptomyces coelicolor agarase gene (dagA), and prokaryotic beta-lactamase gene (Villa-Kamaroff et al., 1978, Proc. Natl. Acad. Sci. USA 75: 3727-3731), as well as the tac promoter (DeBoer et al., 1983, Proc. Natl. Acad. Sci. USA 80: 21-25). Further promoters are described in “Useful proteins from recombinant bacteria” in Gilbert et al., 1980, Scientific American 242: 74-94; and in Sambrook et al., 1989, supra. Examples of tandem promoters are disclosed in WO 99/43835.

[0176] Examples of suitable promoters for directing the transcription of the nucleic acid constructs in a yeast cells, include, but are not limited to, the promoters obtained from the genes for enolase, (e.g., S. cerevisiae enolase or I. orientalis enolase (ENO1)), galactokinase (e.g., S. cerevisiae galactokinase or I. orientalis galactokinase (GAL1)), alcohol dehydrogenase/glyceraldehyde-3-phosphate dehydrogenase (e.g., S. cerevisiae alcohol dehydrogenase/glyceraldehyde-3-phosphate dehydrogenase or I. orientalis alcohol dehydrogenase/glyceraldehyde-3-phosphate dehydrogenase (ADH1, ADH2/GAP)), triose phosphate isomerase (e.g., S. cerevisiae triose phosphate isomerase or I. orientalis triose phosphate isomerase (TPI)), metallothionein (e.g., S. cerevisiae metallothionein or I. orientalis metallothionein (CUP1)), 3-phosphoglycerate kinase (e.g., S. cerevisiae 3-phosphoglycerate kinase or I. orientalis 3-phosphoglycerate kinase (PGK)), PDC1, xylose reductase (XR), xylitol dehydrogenase (XDH), L-(+)-lactate-cytochrome c oxidoreductase (CYB2), translation elongation factor-1 (TEF1), translation elongation factor-2 (TEF2), glyceraldehyde-3-phosphate dehydrogenase (GAPDH), and orotidine 5′-phosphate decarboxylase (URA3) genes. Other useful promoters for yeast host cells are described by Romanos et al., 1992, Yeast 8: 423-488.

[0177] Examples of suitable promoters for directing transcription of the nucleic acid constructs of the present invention in a filamentous fungal host cell are promoters obtained from the genes for Aspergillus nidulans acetamidase, Aspergillus niger neutral alpha-amylase, Aspergillus niger acid stable alpha-amylase, Aspergillus niger or Aspergillus awamori glucoamylase (glaA), Aspergillus oryzae TAKA amylase, Aspergillus oryzae alkaline protease, Aspergillus oryzae triose phosphate isomerase, Fusarium oxysporum trypsin-like protease (WO 96/00787), Fusarium venenatum amyloglucosidase (WO 00/56900), Fusarium venenatum Dania (WO 00/56900), Fusarium venenatum Quinn (WO 00/56900), Rhizomucor miehei lipase, Rhizomucor miehei aspartic proteinase, Trichoderma reesei beta-glucosidase, Trichoderma reesei cellobiohydrolase I, Trichoderma reesei cellobiohydrolase II, Trichoderma reesei endoglucanase I, Trichoderma reesei endoglucanase II, Trichoderma reesei endoglucanase III, Trichoderma reesei endoglucanase IV, Trichoderma reesei endoglucanase V, Trichoderma reesei xylanase I, Trichoderma reesei xylanase II, Trichoderma reesei beta-xylosidase, as well as the NA2-tpi promoter (a modified promoter from an Aspergillus neutral alpha-amylase gene in which the untranslated leader has been replaced by an untranslated leader from an Aspergillus triose phosphate isomerase gene; non-limiting examples include modified promoters from an Aspergillus niger neutral alpha-amylase gene in which the untranslated leader has been replaced by an untranslated leader from an Aspergillus nidulans or Aspergillus oryzae triose phosphate isomerase gene); and mutant, truncated, and hybrid promoters thereof.

[0178] The control sequence may also be a suitable transcription terminator sequence, which is recognized by a host cell to terminate transcription. The terminator sequence is operably linked to the 3′-terminus of the polynucleotide encoding the polypeptide. Any terminator that is functional in the yeast cell of choice may be used. The terminator may be identical to or share a high degree of sequence identity (e.g., at least about 80%, at least about 85%, at least about 90%, at least about 95%, or at least about 99%) with the selected native terminator. In certain embodiments, 3-HP pathway genes are linked to a terminator that comprises a functional portion of a native GAL10 gene native to the host cell or a sequence that shares at least 80%, at least 85%, at least 90%, or at least 95% sequence identity with a native GAL10 terminator.

[0179] Suitable terminators for bacterial host cells may be obtained from the genes for Bacillus clausii alkaline protease (aprH), Bacillus licheniformis alpha-amylase (amyL), and Escherichia coli ribosomal RNA (rrnB).

[0180] Suitable terminators for yeast host cells may be obtained from the genes for enolase (e.g., S. cerevisiae or I. orientalis enolase cytochrome C (e.g., S. cerevisiae or I. orientalis cytochrome (CYC1)), glyceraldehyde-3-phosphate dehydrogenase (e.g., S. cerevisiae or I. orientalis glyceraldehyde-3-phosphate dehydrogenase (gpd)), PDC1, XR, XDH, transaldolase (TAL), transketolase (TKL), ribose 5-phosphate ketol-isomerase (RKI), CYB2, and the galactose family of genes (especially the GAL10 terminator). Other useful terminators for yeast host cells are described by Romanos et al., 1992, supra.

[0181] Suitable terminators for filamentous fungal host cells may be obtained from the genes for Aspergillus nidulans anthranilate synthase, Aspergillus niger glucoamylase, Aspergillus niger alpha-glucosidase, Aspergillus oryzae TAKA amylase, and Fusarium oxysporum trypsin-like protease.

[0182] The control sequence may also be an mRNA stabilizer region downstream of a promoter and upstream of the coding sequence of a gene which increases expression of the gene.

[0183] Examples of suitable mRNA stabilizer regions are obtained from a Bacillus thuringiensis cryIIIA gene (WO 94/25612) and a Bacillus subtilis SP82 gene (Hue et al., 1995, Journal of Bacteriology 177: 3465-3471).

[0184] The control sequence may also be a suitable leader sequence, when transcribed is a nontranslated region of an mRNA that is important for translation by the host cell. The leader sequence is operably linked to the 5′-terminus of the polynucleotide encoding the polypeptide. Any leader sequence that is functional in the yeast cell of choice may be used.

[0185] Suitable leaders for yeast host cells are obtained from the genes for enolase (e.g., S. cerevisiae or I. orientalis enolase (ENO-1)), 3-phosphoglycerate kinase (e.g., S. cerevisiae or I. orientalis 3-phosphoglycerate kinase), alpha-factor (e.g., S. cerevisiae or I. orientalis alpha-factor), and alcohol dehydrogenase/glyceraldehyde-3-phosphate dehydrogenase (e.g., S. cerevisiae or I. orientalis alcohol dehydrogenase/glyceraldehyde-3-phosphate dehydrogenase (ADH2/GAP)).

[0186] Preferred leaders for filamentous fungal host cells are obtained from the genes for Aspergillus oryzae TAKA amylase and Aspergillus nidulans triose phosphate isomerase.

[0187] The control sequence may also be a polyadenylation sequence; a sequence operably linked to the 3′-terminus of the polynucleotide and, when transcribed, is recognized by the host cell as a signal to add polyadenosine residues to transcribed mRNA. Any polyadenylation sequence that is functional in the host cell of choice may be used. Useful polyadenylation sequences for yeast cells are described by Guo and Sherman, 1995, Mol. Cellular Biol. 15: 5983-5990. Preferred polyadenylation sequences for filamentous fungal host cells are obtained from the genes for Aspergillus nidulans anthranilate synthase, Aspergillus niger glucoamylase, Aspergillus niger alpha-glucosidase, Aspergillus oryzae TAKA amylase, and Fusarium oxysporum trypsin-like protease.

[0188] It may also be desirable to add regulatory sequences that allow the regulation of the expression of the polypeptide relative to the growth of the host cell. Examples of regulatory systems are those that cause the expression of the gene to be turned on or off in response to a chemical or physical stimulus, including the presence of a regulatory compound. Regulatory systems in prokaryotic systems include the lac, tac, and trp operator systems. In yeast, the ADH2 system or GAL1 system may be used. In filamentous fungi, the Aspergillus niger glucoamylase promoter, Aspergillus oryzae TAKA alpha-amylase promoter, and Aspergillus oryzae glucoamylase promoter may be used. Other examples of regulatory sequences are those that allow for gene amplification. In eukaryotic systems, these regulatory sequences include the dihydrofolate reductase gene that is amplified in the presence of methotrexate, and the metallothionein genes that are amplified with heavy metals. In these cases, the polynucleotide encoding the polypeptide would be operably linked with the regulatory sequence.

[0189] The vectors may contain one or more (e.g., two, several) selectable markers that permit easy selection of transformed, transfected, transduced, or the like cells. A selectable marker is a gene the product of which provides for biocide or viral resistance, resistance to heavy metals, prototrophy to auxotrophs, and the like.

[0190] Examples of bacterial selectable markers are Bacillus licheniformis or Bacillus subtilis dal genes, or markers that confer antibiotic resistance such as ampicillin, chloramphenicol, kanamycin, neomycin, spectinomycin or tetracycline resistance. Suitable markers for yeast host cells include, but are not limited to, ADE2, HIS3, LEU2, LYS2, MET3, TRP1, and URA3. Selectable markers for use in a filamentous fungal host cell include, but are not limited to, amdS (acetamidase), argB (ornithine carbamoyltransferase), bar (phosphinothricin acetyltransferase), hph (hygromycin phosphotransferase), niaD (nitrate reductase), pyrG (orotidine-5′-phosphate decarboxylase), sC (sulfate adenyltransferase), and trpC (anthranilate synthase), as well as equivalents thereof. Preferred for use in an Aspergillus cell are Aspergillus nidulans or Aspergillus oryzae amdS and pyrG genes and a Streptomyces hygroscopicus bar gene.

[0191] The vectors may contain one or more (e.g., two, several) elements that permit integration of the vector into the host cell's genome or autonomous replication of the vector in the cell independent of the genome.

[0192] For integration into the host cell genome, the vector may rely on the polynucleotide's sequence encoding the polypeptide or any other element of the vector for integration into the genome by homologous or non-homologous recombination. Alternatively, the vector may contain additional polynucleotides for directing integration by homologous recombination into the genome of the host cell at a precise location(s) in the chromosome(s). To increase the likelihood of integration at a precise location, the integrational elements should contain a sufficient number of nucleic acids, such as 100 to 10,000 base pairs, 400 to 10,000 base pairs, and 800 to 10,000 base pairs, which have a high degree of sequence identity to the corresponding target sequence to enhance the probability of homologous recombination. The integrational elements may be any sequence that is homologous with the target sequence in the genome of the host cell. Furthermore, the integrational elements may be non-encoding or encoding polynucleotides. On the other hand, the vector may be integrated into the genome of the host cell by non-homologous recombination. Potential integration loci include those described in the art (e.g., See US2012/0135481).

[0193] For autonomous replication, the vector may further comprise an origin of replication enabling the vector to replicate autonomously in the yeast cell. The origin of replication may be any plasmid replicator mediating autonomous replication that functions in a cell. The term “origin of replication” or “plasmid replicator” means a polynucleotide that enables a plasmid or vector to replicate in vivo.

[0194] Examples of bacterial origins of replication are the origins of replication of plasmids pBR322, pUC19, pACYC177, and pACYC184 permitting replication in E. coli, and pUB110, pE194, pTA1060, and pAMß1 permitting replication in Bacillus.

[0195] Examples of origins of replication for use in a yeast host cell are the 2 micron origin of replication, ARS1, ARS4, the combination of ARS1 and CEN3, and the combination of ARS4 and CEN6.

[0196] Examples of origins of replication useful in a filamentous fungal cell are AMA1 and ANSI (Gems et al., 1991, Gene 98: 61-67; Cullen et al., 1987, Nucleic Acids Res. 15: 9163-9175; WO 00/24883). Isolation of the AMA1 gene and construction of plasmids or vectors comprising the gene can be accomplished according to the methods disclosed in WO 00/24883.

[0197] More than one copy of a polynucleotide described herein may be inserted into a host cell to increase production of a polypeptide. An increase in the copy number of the polynucleotide can be obtained by integrating at least one additional copy of the sequence into the yeast cell genome or by including an amplifiable selectable marker gene with the polynucleotide where cells containing amplified copies of the selectable marker gene, and thereby additional copies of the polynucleotide, can be selected for by cultivating the cells in the presence of the appropriate selectable agent.

[0198] The procedures used to ligate the elements described above to construct the recombinant expression vectors described herein are well known to one skilled in the art (see, e.g., Sambrook et al., 1989, supra).

[0199] Additional procedures and techniques known in the art for the preparation of recombinant cells comprising one or more 3-HP pathway genes, are described in, e.g., WO 2012/074818, the content of which is hereby incorporated by reference.

### Active 3-HP Pathway

[0200] The host cells described herein may comprise an active 3-HP pathway. 3-HP pathways, 3-HP pathway genes and corresponding engineered transformants for fermentation of 3-HP are known in the art (e.g., US Publication No. 2012/0135481; U.S. Pat. No. 6,852,517; U.S. Pat. No. 7,309,597; US Pub. No. 2001/0021978; US Pub. No. 2008/0199926; WO02/42418; and WO10/031083; the content of which is hereby incorporated in its entirety). An overview of several known 3-HP pathways is shown in FIG. 1.

[0201] In certain embodiments, the recombinant cells provided herein have an active 3-HP pathway that proceeds through a β-alanine and/or malonate semialdehyde intermediate. Several 3-HP pathways are known in the art to proceed through a malonate semialdehyde intermediate. For example, the cells may have an active 3-HP pathway that proceeds is through PEP or pyruvate, OAA, aspartate, β-alanine, and malonate semialdehyde intermediates (see, e.g., U.S. Pat. No. 7,186,541; FIG. 55). In these embodiments, the recombinant cells comprise a set of 3-HP pathway genes comprising one or more of pyruvate carboxylase (PYC), PEP carboxylase (PPC), aspartate aminotransferase (AAT), aspartate 1-decarboxylase (ADC), β-alanine aminotransferase (BAAT), aminobutyrate aminotransferase (gabT), 3-HP dehydrogenase (3-HPDH), 3-hydroxyisobutyrate dehydrogenase (HIBADH), and 4-hydroxybutyrate dehydrogenase genes. The 3-HP pathway genes may also include a PEP carboxykinase (PCK) gene that has been modified to produce a polypeptide that preferably catalyzes the conversion of PEP to OAA (native PCK genes generally produce a polypeptide that preferably catalyzes the reverse reaction of OAA to PEP).

[0202] In another example, the recombinant cells may have an active 3-HP pathway that proceeds through PEP or pyruvate, OAA, and malonate semialdehyde intermediates (see, e.g., US Pub. No. 2010/0021978, FIG. 1). In these embodiments, the cells comprise a set of 3-HP pathway genes comprising one or more of PPC, PYC, 2-keto acid decarboxylase, alpha-ketoglutarate (AKG) decarboxylase (KG D), branched-chain alpha-keto acid decarboxylase (BCKA), indolepyruvate decarboxylase (IPDA), 3-HPDH, HIBADH, and 4-hydroxybutyrate dehydrogenase genes. The 3-HP pathway genes may also include a PCK gene that has been modified to produce a polypeptide that preferably catalyzes the conversion of PEP to OAA. Further, the 3-HP pathway genes may include a PDC gene and/or benzoylformate decarboxylase gene that has been modified to encode a polypeptide capable of catalyzing the conversion of OAA to malonate semialdehyde.

[0203] In another example, the recombinant cells may have an active 3-HP pathway that proceeds through PEP or pyruvate, OAA, malonyl-CoA, and malonate semialdehyde intermediates, wherein the malonate semialdehyde intermediate is optional (see, e.g., US Pub. No. 2010/0021978, FIG. 2). In these embodiments, the cells comprise a set of 3-HP pathway genes comprising one or more of PPC, PYC, OAA formatelyase, malonyl-CoA reductase, CoA acylating malonate semialdehyde dehydrogenase, 3-HPDH, HIBADH, and 4-hydroxybutyrate dehydrogenase genes. The 3-HP pathway genes may also include a PCK gene that has been modified to produce a polypeptide that preferably catalyzes the conversion of PEP to OAA. Further, the 3-HP pathway genes may include an OAA dehydrogenase gene derived by modifying a 2-keto-acid dehydrogenase gene to produce a polypeptide that catalyzes the conversion of OAA to malonyl-CoA.

[0204] In another example, the recombinant cells may have an active 3-HP pathway that proceeds through pyruvate, acetyl-CoA, malonyl-CoA, and malonate semialdehyde intermediates, wherein the malonate semialdehyde intermediate is optional (see, e.g., U.S. Pat. No. 7,186,541; FIG. 44). In these embodiments, the cells comprise a set of 3-HP pathway genes comprising one or more of pyruvate dehydrogenase (PDH), acetyl-CoA carboxylase (ACC), malonyl-CoA reductase, CoA acylating malonate semialdehyde dehydrogenase, 3-HPDH, HIBADH, and 4-hydroxybutyrate dehydrogenase genes.

[0205] In another example, the recombinant cells may have an active 3-HP pathway that proceeds through pyruvate, alanine, β-alanine, β-alanyl-CoA, acrylyl-CoA, 3-HP-CoA, and malonate semialdehyde intermediates, wherein the β-alanyl-CoA, acrylyl-CoA, 3-HP-CoA, and malonate semialdehyde intermediates are optional (β-alanine can be converted to 3-HP via a malonate semialdehyde intermediate or via β-alanyl-CoA, acrylyl-CoA, and 3-HP-CoA intermediates (see, e.g., U.S. Pat. No. 7,309,597, FIG. 1). In these embodiments, the cells comprise a set of 3-HP pathway genes comprising one or more of alanine dehydrogenase, pyruvate/alanine aminotransferase, alanine 2,3 aminomutase, CoA transferase, CoA synthetase, β-alanyl-CoA ammonia lyase, 3-HP-CoA dehydratase, 3-HP-CoA hydrolase, 3-hydroxyisobutyryl-CoA hydrolase, BAAT, 3-HPDH, HIBADH, and 4-hydroxybutyrate dehydrogenase genes.

[0206] Other pathways that do not utilize a malonate semialdehyde intermediate are also known in the art. For example, the recombinant cells may have an active 3-HP pathway that proceeds through PEP or pyruvate, OAA, and malate intermediates (see, e.g., US Pub. No. 2010/0021978; FIG. 4). In these embodiments, the cells comprise a set of 3-HP pathway genes comprising one or more of PPC, PYC, malate dehydrogenase, and malate decarboxylase genes. The 3-HP pathway genes may also include a PCK gene that has been modified to produce a polypeptide that preferably catalyzes the conversion of PEP to OAA.

[0207] In another example, the recombinant cells may have an active 3-HP pathway that proceeds through pyruvate, lactate, lactyl-CoA, acrylyl-CoA, and 3-HP-CoA intermediates (see, e.g., WO02/042418, FIG. 1). In these embodiments, the cells comprise a set of 3-HP pathway genes comprising one or more of LDH, CoA transferase, CoA synthetase, lactyl-CoA dehydratase, 3-HP-CoA dehydratase, 3-HP-CoA hydrolase, and 3-hydroxyisobutyryl-CoA hydrolase genes.

[0208] In another example, the recombinant cells may have an active 3-HP pathway that proceeds through glycerol and 3-HPA intermediates (see, e.g., U.S. Pat. No. 6,852,517). In these embodiments, the cells comprise a set of 3-HP pathway genes comprising one or more of glycerol dehydratase and aldehyde dehydrogenase genes.

[0209] In another example, the recombinant cells may have an active 3-HP pathway that proceeds through PEP or pyruvate, OAA, aspartate, β-alanine, β-alanyl-CoA, acrylyl-CoA, 3-HP-CoA, and alanine intermediates, wherein the OAA, aspartate, and alanine intermediates are optional (PEP or pyruvate can be converted to β-alanine via OAA and aspartate or via alanine) (see WO02/042418, FIG. 54; U.S. Pat. No. 7,309,597, FIG. 1). In these embodiments, the cells comprise a set of 3-HP pathway genes comprising one or more of PPC, PYC, AAT, ADC, CoA transferase, CoA synthetase, β-alanyl-CoA ammonia lyase, 3-HP-CoA dehydratase, 3-HP-CoA hydrolase, 3-hydroxyisobutyrl-CoA hydrolase, alanine dehydrogenase, pyruvate/alanine aminotransferase, and AAM genes. The 3-HP pathway genes may also include a PCK gene that has been modified to produce a polypeptide that preferably catalyzes the conversion of PEP to OAA.

[0210] In certain embodiments, the recombinant cells provided herein express one or more 3-HP pathway genes encoding enzymes selected from the group consisting of ACC (catalyzes the conversion of acetyl-CoA to malonyl-CoA), alanine 2,3 aminomutase (AAM, catalyzes the conversion of alanine to β-alanine), alanine dehydrogenase (catalyzes the conversion of pyruvate to alanine), aldehyde dehydrogenase (catalyzes the conversion of 3-HPA to 3-HP), KGD (catalyzes the conversion of OAA to malonate semialdehyde), AAT (catalyzes the conversion of OAA to aspartate), ADC (catalyzes the conversion of aspartate to β-alanine), BCKA (catalyzes the conversion of OAA to malonate semialdehyde), BAAT (catalyzes the conversion of β-alanine to malonate semialdehyde), 4-aminobutyrate aminotransferase (gabT, catalyzes the conversion of β-alanine to malonate semialdehyde), β-alanyl-CoA ammonia lyase (catalyzes the conversion of β-alanyl-CoA to acrylyl-CoA), Co-A acylating malonate semialdehyde dehydrogenase (catalyzes the conversion of malonyl-CoA to malonate semialdehyde), CoA synthetase (catalyzes the conversion of β-alanine to β-alanyl-CoA or the conversion of lactate to lactyl-CoA), CoA transferase (catalyzes the conversion of β-alanine to β-alanyl-CoA and/or the conversion of lactate to lactyl-CoA), glycerol dehydratase (catalyzes the conversion of glycerol to 3-HPA), IPDA (catalyzes the conversion of OAA to malonate semialdehyde), LDH (catalyzes the conversion of pyruvate to lactate), lactyl-CoA dehydratase (catalyzes the conversion of lactyl-CoA to acrylyl-CoA), malate decarboxylase (catalyzes the conversion of malate to 3-HP), malate dehydrogenase (catalyzes the conversion of OAA to malate), malonyl-CoA reductase (catalyzes the conversion of malonyl-CoA to malonate semialdehyde or 3-HP), OAA formatelyase (also known as pyruvate-formate lyase and ketoacid formate-lyase, catalyzes the conversion of OAA to malonyl-CoA), OAA dehydrogenase (catalyzes the conversion of OAA to malonyl CoA); PPC (catalyzes the conversion of PEP to OAA), pyruvate/alanine aminotransferase (catalyzes the conversion of pyruvate to alanine), PYC (catalyzes the conversion of pyruvate to OAA), PDH (catalyzes the conversion of pyruvate to acetyl-CoA), 2-keto acid decarboxylase (catalyzes the conversion of OAA to malonate semialdehyde), 3-HP-CoA dehydratase (also known as acrylyl-CoA hydratase, catalyzes the conversion of acrylyl-CoA to 3-HP-CoA), 3-HPDH (catalyzes the conversion of malonate semialdehyde to 3-HP), 3-HP-CoA hydrolase (catalyzes the conversion of 3-HP-CoA to 3-HP), HIBADH (catalyzes the conversion of malonate semialdehyde to 3-HP), 3-hydroxyisobutyryl-CoA hydrolase (catalyzes the conversion of 3-HP-CoA to 3-HP), and 4-hydroxybutyrate dehydrogenase (catalyzes the conversion of malonate semialdehyde to 3-HP). For each of these enzyme activities, the reaction of interest in parentheses may be a result of endogenous or heterologous activity.

[0211] Any suitable 3-HP pathway gene, endogenous or heterologous, may be used and expressed in sufficient amount to produce an enzyme involved in a selected active 3-HP pathway. With the complete genome sequence available for now more than 550 species (with more than half of these available on public databases such as the NCBI), including 395 microorganism genomes and a variety of yeast, fungi, plant, and mammalian genomes, the identification of genes encoding the selected 3-HP pathway enzymatic activities taught herein is routine and well known in the art for a selected host. For example, suitable homologues, orthologs, paralogs and nonorthologous gene displacements of known genes, and the interchange of genetic alterations between organisms can be identified in related or distant host to a selected host.

[0212] For recombinant cells without a known genome sequence, sequences for genes of interest (either as overexpression candidates or as insertion sites) can typically be obtained using techniques known in the art. Routine experimental design can be employed to test expression of various genes and activity of various enzymes, including genes and enzymes that function in a 3-HP pathway. Experiments may be conducted wherein each enzyme is expressed in the cell individually and in blocks of enzymes up to and including preferably all pathway enzymes, to establish which are needed (or desired) for improved 3-HP production. One illustrative experimental design tests expression of each individual enzyme as well as of each unique pair of enzymes, and further can test expression of all required enzymes, or each unique combination of enzymes. A number of approaches can be taken, as will be appreciated.

[0213] The recombinant host cells of the invention can be produced by introducing heterologous polynucleotides encoding one or more of the enzymes participating in a 3-HP pathway, as described below. As one in the art will appreciate, in some instances (e.g., depending on the selection of host) the heterologous expression of every gene shown in the 3-HP pathway may not be required for 3-HP production since a host cell may have endogenous enzymatic activity from one or more pathway genes. For example, if a chosen host is deficient in one or more enzymes of a 3-HP pathway, then heterologous polynucleotides for the deficient enzyme(s) are introduced into the host for subsequent expression. Alternatively, if the chosen host exhibits endogenous expression of some pathway genes, but is deficient in others, then an encoding polynucleotide is needed for the deficient enzyme(s) to achieve 3-HP biosynthesis. Thus, a recombinant host cell of the invention can be produced by introducing heterologous polynucleotides to obtain the enzyme activities of a desired biosynthetic pathway or a desired biosynthetic pathway can be obtained by introducing one or more heterologous polynucleotides that, together with one or more endogenous enzymes, produces a desired product such as 3-HP.

[0214] Depending on the 3-HP pathway constituents of a selected recombinant host organism, the host cells of the invention will include at least one heterologous polynucleotide and optionally up to all encoding heterologous polynucleotides for the 3-HP pathway. For example, 3-HP biosynthesis can be established in a host deficient in a 3-HP pathway enzyme through heterologous expression of the corresponding polynucleotide. In a host deficient in all enzymes of a 3-HP pathway, heterologous expression of all enzymes in the pathway can be included, although it is understood that all enzymes of a pathway can be expressed even if the host contains at least one of the pathway enzymes.

[0215] A “pyruvate carboxylase gene” or “PYC gene” as used herein refers to any gene that encodes a polypeptide with pyruvate carboxylase activity, meaning the ability to catalyze the conversion of pyruvate, CO₂, and ATP to OAA, ADP, and phosphate. In certain embodiments, the PYC gene may be derived from a bacterial source. For example, the PYC gene may be derived from one of the few bacterial species that use only PYC and not PPC (see below) for anaplerosis, such as R. sphaeroides, or from a bacterial species that possesses both PYC and PPC, such as R. etli. The amino acid sequences encoded by the PYC genes of R. sphaeroides and R. etli are set forth in SEQ ID NOs: 3 and 4, respectively. A PYC gene may be derived from a gene encoding the amino acid sequence of SEQ ID NOs: 3 or 4, or from a gene encoding an amino acid sequence with at least 50%, at least 60%, at least 70%, at least 80%, at least 85%, at least 90%, at least 95%, at least 97%, or at least 99% sequence identity to the amino acid sequence of SEQ ID NOs: 3 or 4. Alternatively, the PYC gene may be derived from a PYC gene encoding an enzyme that does not have a dependence on acetyl-CoA for activation, such as a P. fluorescens PYC gene encoding the amino acid sequence set forth in SEQ ID NO: 5 (carboxytransferase subunit) or SEQ ID NO: 6 (biotin carboxylase subunit), a C. glutamicum PYC gene of encoding the amino acid sequence set forth in SEQ ID NO: 7, or a gene encoding an amino acid sequence with at least 50%, at least 60%, at least 70%, at least 80%, at least 85%, at least 90%, at least 95%, at least 97%, or at least 99% sequence identity to the amino acid sequence of SEQ ID NOs: 5, 6, or 7. A PYC gene may also be derived from a PYC gene that encodes an enzyme that is not inhibited by aspartate, such as an S. meliloti PYC gene encoding the amino acid sequence set forth in SEQ ID NO: 8 (Sauer FEMS Microbiol Rev 29:765 (2005), or from a gene encoding an amino acid sequence with at least 50%, at least 60%, at least 70%, at least 80%, at least 85%, at least 90%, at least 95%, at least 97%, or at least 99% sequence identity to the amino acid sequence of SEQ ID NO: 8. In certain embodiments, a PYC gene may be derived from a yeast source. For example, the PYC gene may be derived from an I. orientalis PYC gene encoding the amino acid sequence set forth in SEQ ID NO: 2. In other embodiments, the gene may encode an amino acid sequence with at least 50%, at least 60%, at least 70%, at least 80%, at least 85%, at least 90%, at least 95%, at least 97%, or at least 99% sequence identity to the amino acid sequence of SEQ ID NO: 2. In certain embodiments, an I. orientalis-derived PYC gene may comprise the nucleotide sequence set forth in SEQ ID NO: 1 or a nucleotide sequence with at least 50%, at least 60%, at least 70%, at least 80%, at least 85%, at least 90%, at least 95%, at least 97%, or at least 99% sequence identity to the nucleotide sequence set forth in SEQ ID NO: 1.

[0216] A “PEP carboxylase gene” or “PPC gene” as used herein refers to any gene that encodes a polypeptide with PEP carboxylase activity, meaning the ability to catalyze the conversion of PEP and CO₂ to OAA and phosphate. In certain embodiments, a PPC gene may be derived from a bacterial PPC gene. For example, the PPC gene may be derived from an E. coli PPC gene encoding the amino acid sequence set forth in SEQ ID NO: 10 or an amino acid sequence with at least 50%, at least 60%, at least 70%, at least 80%, at least 85%, at least 90%, at least 95%, at least 97%, or at least 99% sequence identity to the amino acid sequence of SEQ ID NO: 10. In certain embodiments, an E. coli-derived PPC gene may comprise the nucleotide sequence set forth in SEQ ID NO: 9 or a nucleotide sequence with at least 50%, at least 60%, at least 70%, at least 80%, at least 85%, at least 90%, at least 95%, at least 97%, or at least 99% sequence identity to the nucleotide sequence set forth in SEQ ID NO: 9. In other embodiments, a PPC gene may be derived from an “A” type PPC, found in many archea and a limited number of bacteria, that is not activated by acetyl CoA and is less inhibited by aspartate. For example, a PPC gene may be derived from an M. thermoautotrophicum PPC A gene encoding the amino acid sequence set forth in SEQ ID NO: 11, a C. perfringens PPC A gene encoding the amino acid sequence set forth in SEQ ID NO: 12, or a gene encoding an amino acid sequence with at least 50%, at least 60%, at least 70%, at least 80%, at least 85%, at least 90%, at least 95%, at least 97%, or at least 99% sequence identity to the amino acid sequence of SEQ ID NOs: 11 or 12. In certain of these embodiments, the gene may have undergone one or more mutations versus the native gene in order to generate an enzyme with improved characteristics. For example, the gene may have been mutated to encode a PPC polypeptide with increased resistance to aspartate feedback versus the native polypeptide. In other embodiments, the PPC gene may be derived from a plant source.

[0217] An “aspartate aminotransferase gene” or “AAT gene” as used herein refers to any gene that encodes a polypeptide with aspartate aminotransferase activity, meaning the ability to catalyze the conversion of OAA to aspartate. Enzymes having aspartate aminotransferase activity are classified as EC 2.6.1.1. In certain embodiments, the AAT gene may be derived from a bacterial source. For example, the AAT gene may be derived from an E. coli aspC gene encoding a polypeptide comprising the amino acid sequence set forth in SEQ ID NO: 16. In other embodiments, the gene may encode an amino acid sequence with at least 50%, at least 60%, at least 70%, at least 80%, at least 85%, at least 90%, at least 95%, at least 97%, or at least 99% sequence identity to the amino acid sequence of SEQ ID NO: 16. In certain embodiments, an AAT gene may be derived from a yeast source such as S. cerevisiae or I. orientalis. For example, the AAT gene may be derived from an I. orientalis AAT gene encoding the amino acid sequence set forth in SEQ ID NO: 14 or an S. cerevisiae AAT2 gene encoding the amino acid sequence set forth in SEQ ID NO: 15. In other embodiments, the gene may encode an amino acid sequence with at least 50%, at least 60%, at least 70%, at least 80%, at least 85%, at least 90%, at least 95%, at least 97%, or at least 99% sequence identity to the amino acid sequence of SEQ ID NOs: 14 or 15. In certain embodiments, an I. orientalis-derived AAT gene may comprise the nucleotide sequence set forth in SEQ ID NO: 13 or a nucleotide sequence with at least 50%, at least 60%, at least 70%, at least 80%, at least 85%, at least 90%, at least 95%, at least 97%, or at least 99% sequence identity to the nucleotide sequence set forth in SEQ ID NO: 13.

[0218] An “aspartate decarboxylase gene” or “ADC gene” as used herein refers to any gene that encodes a polypeptide with aspartate decarboxylase activity, meaning the ability to catalyze the conversion of aspartate to β-alanine. Enzymes having aspartate decarboxylase activity are classified as EC 4.1.1.11. In certain embodiments, an ADC gene may be derived from a bacterial source.

[0219] In some embodiments, the ADC gene may be derived from an S. avermitilis panD gene encoding the amino acid sequence set forth in SEQ ID NO: 17. In some embodiments, the ADC gene may encode an amino acid sequence with at least 50%, at least 60%, at least 70%, at least 80%, at least 85%, at least 90%, at least 95%, at least 97%, or at least 99% sequence identity to the amino acid sequence of SEQ ID NO: 17. In certain embodiments, an S. avermitilis-derived ADC gene may comprise the nucleotide sequence set forth in any one of SEQ ID NOs: 130, 145, 146, or 147; or a nucleotide sequence with at least 50%, at least 60%, at least 70%, at least 80%, at least 85%, at least 90%, at least 95%, at least 97%, or at least 99% sequence identity to the nucleotide sequence set forth in any one of SEQ ID NOs: 130, 145, 146, or 147.

[0220] In other embodiments, the ADC gene may be derived from a C. acetobutylicum panD gene encoding the amino acid sequence set forth in SEQ ID NO: 18. In some embodiments, the ADC gene may encode an amino acid sequence with at least 50%, at least 60%, at least 70%, at least 80%, at least 85%, at least 90%, at least 95%, at least 97%, or at least 99% sequence identity to the amino acid sequence of SEQ ID NO: 18. In certain embodiments, a C. acetobutylicum-derived ADC gene may comprise the nucleotide sequence set forth in SEQ ID NO: 131, or a nucleotide sequence with at least 50%, at least 60%, at least 70%, at least 80%, at least 85%, at least 90%, at least 95%, at least 97%, or at least 99% sequence identity to the nucleotide sequence set forth in SEQ ID NO: 131.

[0221] In other embodiments, the ADC gene may be derived from a H. pylori ADC gene encoding the amino acid sequence set forth in SEQ ID NO: 133. In some embodiments, the ADC gene may encode an amino acid sequence with at least 50%, at least 60%, at least 70%, at least 80%, at least 85%, at least 90%, at least 95%, at least 97%, or at least 99% sequence identity to the amino acid sequence of SEQ ID NO: 133. In certain embodiments, a H. pylori-derived ADC gene may comprise the nucleotide sequence set forth in SEQ ID NO: 133, or a nucleotide sequence with at least 50%, at least 60%, at least 70%, at least 80%, at least 85%, at least 90%, at least 95%, at least 97%, or at least 99% sequence identity to the nucleotide sequence set forth in SEQ ID NO: 133.

[0222] In other embodiments, the ADC gene may be derived from a Bacillus sp. TS25 ADC gene encoding the amino acid sequence set forth in SEQ ID NO: 135. In some embodiments, the ADC gene may encode an amino acid sequence with at least 50%, at least 60%, at least 70%, at least 80%, at least 85%, at least 90%, at least 95%, at least 97%, or at least 99% sequence identity to the amino acid sequence of SEQ ID NO: 135. In certain embodiments, a Bacillus sp. TS25-derived ADC gene may comprise the nucleotide sequence set forth in SEQ ID NO: 134, or a nucleotide sequence with at least 50%, at least 60%, at least 70%, at least 80%, at least 85%, at least 90%, at least 95%, at least 97%, or at least 99% sequence identity to the nucleotide sequence set forth in SEQ ID NO: 134.

[0223] In other embodiments, the ADC gene may be derived from a C. glutamicum ADC gene encoding the amino acid sequence set forth in SEQ ID NO: 137. In some embodiments, the ADC gene may encode an amino acid sequence with at least 50%, at least 60%, at least 70%, at least 80%, at least 85%, at least 90%, at least 95%, at least 97%, or at least 99% sequence identity to the amino acid sequence of SEQ ID NO: 137. In certain embodiments, a C. glutamicum-derived ADC gene may comprise the nucleotide sequence set forth in SEQ ID NO: 136, or a nucleotide sequence with at least 50%, at least 60%, at least 70%, at least 80%, at least 85%, at least 90%, at least 95%, at least 97%, or at least 99% sequence identity to the nucleotide sequence set forth in SEQ ID NO: 136.

[0224] In other embodiments, the ADC gene may be derived from a B. licheniformis ADC gene encoding the amino acid sequence set forth in SEQ ID NO: 139. In some embodiments, the ADC gene may encode an amino acid sequence with at least 50%, at least 60%, at least 70%, at least 80%, at least 85%, at least 90%, at least 95%, at least 97%, or at least 99% sequence identity to the amino acid sequence of SEQ ID NO: 139. In certain embodiments, a B. licheniformis-derived ADC gene may comprise the nucleotide sequence set forth in any one of SEQ ID NOs: 138, 148, 149, 150, or 151; or a nucleotide sequence with at least 50%, at least 60%, at least 70%, at least 80%, at least 85%, at least 90%, at least 95%, at least 97%, or at least 99% sequence identity to the nucleotide sequence set forth in any one of SEQ ID NOs: 138, 148, 149, 150, or 151.

[0225] In other embodiments, the ADC gene may be derived from the Class Insecta (insect) ADC gene, e.g., as described in WO 2015/017721 (the content of which is incorporated herein by reference). For example, in some embodiments, the ADC gene may encode an amino acid sequence of the Aedes aegypti ADC of SEQ ID NO: 162, the Culex quinquefasciatus ADC of SEQ ID NO: 163, the Anopheles gambiae ADC of SEQ ID NO: 164, the Tribolium castaneum ADC of SEQ ID NO: 165, the Attagenus smirnovi ADC of SEQ ID NO: 166, the Acyrthosiphon pisum ADC of SEQ ID NO: 167, the Drosophila sechellia ADC of SEQ ID NO: 168, the Drosophila melanogaster ADC of SEQ ID NO: 169, the Danaus plexippus ADC of SEQ ID NO: 170, the Drosophila yakuba ADC of SEQ ID NO: 171, the Drosophila erecta ADC of SEQ ID NO: 172, the Papilio xuthus ADC of SEQ ID NO: 173, the Drosophila persimilis ADC of SEQ ID NO: 174, the Bombyx mori ADC of SEQ ID NO: 175, the Drosophila ananassae ADC of SEQ ID NO: 176, the Drosophila mojavensis ADC of SEQ ID NO: 177, the Drosophila grimshawi ADC of SEQ ID NO: 178, the Biston betularia ADC of SEQ ID NO: 179, the Drosophila willistoni ADC of SEQ ID NO: 180, the Apis mellifera ADC of SEQ ID NO: 181, the Drosophila virilis ADC of SEQ ID NO: 182, the Nasonia vitripennis ADC of SEQ ID NO: 183, the Bicyclus anynana ADC of SEQ ID NO: 184, the Harpegnathos saltator ADC of SEQ ID NO: 185, the Acromyrmex echinatior ADC of SEQ ID NO: 186, the Camponotus floridanus ADC of SEQ ID NO: 187, the Pediculus humanus ADC of SEQ ID NO: 188, the Atta cephalotes ADC of SEQ ID NO: 189, the Meligethes aeneus ADC of SEQ ID NO: 190, or the Solenopsis invicta ADC of SEQ ID NO: 191. In another aspect is a recombinant cell comprising an aspartate 1-decarboxylase (ADC) of the Class Bivalvia, Branchiopoda, Gastropoda, or Leptocardii, such as the Daphnia pulex ADC of SEQ ID NO: 192, the Lottia gigantea ADC of SEQ ID NO: 193, the Branchiostoma floridae ADC of SEQ ID NO: 194, or the Crassostrea gigas ADC of SEQ ID NO: 195. In some embodiments, the ADC gene may encode an amino acid sequence with at least 50%, at least 60%, at least 70%, at least 80%, at least 85%, at least 90%, at least 95%, at least 97%, or at least 99% sequence identity to the amino acid sequence of any one of SEQ ID NOs: 162-195.

[0226] In addition to the aminotransferase (e.g., BAAT) comprising the motif (A,C)-Xn-(GSLS)-Xn-SKA(L/l)(L/l) described herein (e.g., SEQ ID NO: 206, 207, 208, 209, 218, 220, 222, 224, 226, 228, 230, 232, or 234), the recombinant cell may optionally comprise one or more (e.g., two, several) additional aminotransferase gene(s), such as an additional BAAT gene. For example, the additional BAAT gene may be derived from the I. orientalis homolog to the pyd4 gene encoding the amino acid sequence set forth in SEQ ID NO: 20. In some embodiments, the additional BAAT gene may encode an amino acid sequence with at least 50%, at least 60%, at least 70%, at least 80%, at least 85%, at least 90%, at least 95%, at least 97%, or at least 99% sequence identity to the amino acid sequence of SEQ ID NO: 20. In certain embodiments, an additional I. orientalis-derived BAAT gene may comprise the nucleotide sequence set forth in SEQ ID NO: 19 or a nucleotide sequence with at least 50%, at least 60%, at least 70%, at least 80%, at least 85%, at least 90%, at least 95%, at least 97%, or at least 99% sequence identity to the nucleotide sequence set forth in SEQ ID NO: 19. In other embodiments, the additional BAAT gene may be derived from the S. kluyveri pyd4 gene encoding the amino acid sequence set forth in SEQ ID NO: 21. In some embodiments, the additional BAAT gene may encode an amino acid sequence with at least 50%, at least 60%, at least 70%, at least 80%, at least 85%, at least 90%, at least 95%, at least 97%, or at least 99% sequence identity to the amino acid sequence of SEQ ID NO: 21. In certain embodiments, an additional S. kluyveri-derived BAAT gene may comprise the nucleotide sequence set forth in SEQ ID NO: 142 or a nucleotide sequence with at least 50%, at least 60%, at least 70%, at least 80%, at least 85%, at least 90%, at least 95%, at least 97%, or at least 99% sequence identity to the nucleotide sequence set forth in SEQ ID NO: 142. In other embodiments, the additional BAAT gene may be derived from a bacterial source. For example, an additional BAAT gene may be derived from an S. avermitilis BAAT gene encoding the amino acid sequence set forth in SEQ ID NO: 22. In some embodiments, the additional BAAT gene may encode an amino acid sequence with at least 50%, at least 60%, at least 70%, at least 80%, at least 85%, at least 90%, at least 95%, at least 97%, or at least 99% sequence identity to the amino acid sequence of SEQ ID NO: 22. In certain embodiments, an additional S. avermitilis-derived BAAT gene may comprise the nucleotide sequence set forth in SEQ ID NO: 140 or a nucleotide sequence with at least 50%, at least 60%, at least 70%, at least 80%, at least 85%, at least 90%, at least 95%, at least 97%, or at least 99% sequence identity to the nucleotide sequence set forth in SEQ ID NO: 140.

[0227] In some embodiments, the additional BAAT gene may be derived from the S. avermitilis gabT encoding the amino acid sequence set forth in SEQ ID NO: 23. In some embodiments, the S. avermitilis-derived BAAT gene may encode an amino acid sequence with at least 50%, at least 60%, at least 70%, at least 80%, at least 85%, at least 90%, at least 95%, at least 97%, or at least 99% sequence identity to the amino acid sequence of SEQ ID NO: 23. In other embodiments, an additional BAAT gene may be derived from the S. cerevisiae gabT gene uga1 encoding the amino acid sequence set forth in SEQ ID NO: 24. In some embodiments, the S. cerevisiae-derived BAAT gene may encode an amino acid sequence with at least 50%, at least 60%, at least 70%, at least 80%, at least 85%, at least 90%, at least 95%, at least 97%, or at least 99% sequence identity to the amino acid sequence of SEQ ID NO: 24. In certain embodiments, an S. cerevisiae-derived BAAT gene may comprise the nucleotide sequence set forth in SEQ ID NO: 141 or a nucleotide sequence with at least 50%, at least 60%, at least 70%, at least 80%, at least 85%, at least 90%, at least 95%, at least 97%, or at least 99% sequence identity to the nucleotide sequence set forth in SEQ ID NO: 141.

[0228] A “3-HP dehydrogenase gene” or “3-HPDH gene” as used herein refers to any gene that encodes a polypeptide with 3-HP dehydrogenase activity, meaning the ability to catalyze the conversion of malonate semialdehyde to 3-HP. Enzymes having 3-HP dehydrogenase activity are classified as EC 1.1.1.59 if they utilize a NAD(H) cofactor, and as EC 1.1.1.298 if they utilize a NADP(H) cofactor. Enzymes classified as EC 1.1.1.298 are alternatively referred to as malonate semialdehyde reductases.

[0229] In certain embodiments, the 3-HPDH gene may be derived from a bacterial source. For example, a 3-HPDH gene may be derived from an E. coli ydfG gene encoding the amino acid sequence in SEQ ID NO: 27. In some embodiments, the 3-HPDH gene may encode an amino acid sequence with at least 50%, at least 60%, at least 70%, at least 80%, at least 85%, at least 90%, at least 95%, at least 97%, or at least 99% sequence identity to the amino acid sequence of SEQ ID NO: 27. In certain embodiments, the E. coli-derived 3-HPDH gene may comprise the nucleotide sequence set forth in SEQ ID NO: 143 or a nucleotide sequence with at least 50%, at least 60%, at least 70%, at least 80%, at least 85%, at least 90%, at least 95%, at least 97%, or at least 99% sequence identity to the nucleotide sequence set forth in SEQ ID NO: 143. In other embodiments, the 3-HPDH gene may be derived from an M. sedula malonate semialdehyde reductase gene encoding the amino acid sequence set forth in SEQ ID NO: 29. In some embodiments, the 3-HPDH gene may encode an amino acid sequence with at least 50%, at least 60%, at least 70%, at least 80%, at least 85%, at least 90%, at least 95%, at least 97%, or at least 99% sequence identity to the amino acid sequence set forth in SEQ ID NO: 29. In certain embodiments, the M. sedula-derived 3-HPDH gene may comprise the nucleotide sequence set forth in SEQ ID NO: 152 or a nucleotide sequence with at least 50%, at least 60%, at least 70%, at least 80%, at least 85%, at least 90%, at least 95%, at least 97%, or at least 99% sequence identity to the nucleotide sequence set forth in SEQ ID NO: 152.

[0230] In certain embodiments, the 3-HPDH gene may be derived from a yeast source. For example, the 3-HPDH may be derived from the S. cerevisiae YMR226C gene encoding the amino acid sequence set forth in SEQ ID NO: 129. In some embodiments, the 3-HPDH gene may encode an amino acid sequence with at least 50%, at least 60%, at least 70%, at least 80%, at least 85%, at least 90%, at least 95%, at least 97%, or at least 99% sequence identity to the amino acid sequence of SEQ ID NO: 129. In certain embodiments, the S. cerevisiae-derived 3-HPDH gene may comprise the nucleotide sequence set forth in SEQ ID NO: 144 or a nucleotide sequence with at least 50%, at least 60%, at least 70%, at least 80%, at least 85%, at least 90%, at least 95%, at least 97%, or at least 99% sequence identity to the nucleotide sequence set forth in SEQ ID NO: 144. In other embodiments, the 3-HPDH gene may encode an amino acid sequence with at least 50%, at least 60%, at least 70%, at least 80%, at least 85%, at least 90%, at least 95%, at least 97%, or at least 99% sequence identity to the Candida parapsilosis amino acid sequence of SEQ ID NO: 197 (or amino acids 17-354 of SEQ ID NO: 197). In other embodiments, the 3-HPDH gene may be derived from the I. orientalis homolog to the YMR226C gene encoding the amino acid sequence set forth in SEQ ID NO: 26. In some embodiments, the 3-HPDH gene may encode an amino acid sequence with at least 50%, at least 60%, at least 70%, at least 80%, at least 85%, at least 90%, at least 95%, at least 97%, or at least 99% sequence identity to the amino acid sequence of SEQ ID NO: 26. In certain embodiments, the I. orientalis-derived 3-HPDH gene may comprise the nucleotide sequence set forth in SEQ ID NO: 25 or a nucleotide sequence with at least 50%, at least 60%, at least 70%, at least 80%, at least 85%, at least 90%, at least 95%, at least 97%, or at least 99% sequence identity to the nucleotide sequence set forth in SEQ ID NO: 25. In other embodiments, the 3-HPDH gene may encode an amino acid sequence with at least 50%, at least 60%, at least 70%, at least 80%, at least 85%, at least 90%, at least 95%, at least 97%, or at least 99% sequence identity to the Debaryomyces hansenii amino acid sequence of SEQ ID NO: 199. In other embodiments, the 3-HPDH gene may encode an amino acid sequence with at least 50%, at least 60%, at least 70%, at least 80%, at least 85%, at least 90%, at least 95%, at least 97%, or at least 99% sequence identity to the Meyerozyma guilliermondii amino acid sequence of SEQ ID NO: 201. In other embodiments, the 3-HPDH gene may encode an amino acid sequence with at least 50%, at least 60%, at least 70%, at least 80%, at least 85%, at least 90%, at least 95%, at least 97%, or at least 99% sequence identity to the Clavispora lusitaniae amino acid sequence of SEQ ID NO: 203.

[0231] In certain embodiments, the 3-HPDH gene may be a natural or engineered gene having an increased specificity for NAD(H) compared to NADP(H). 3-HPDH variants having increased specificity for NAD(H) are described in WO 2013/049073 (the content of which is incorporated herein by reference).

[0232] A “3-hydroxyisobutyrate dehydrogenase gene” or “HIBADH gene” as used herein refers to any gene that encodes a polypeptide with 3-hydroxyisobutyrate dehydrogenase activity, meaning the ability to catalyze the conversion of 3-hydroxyisobutyrate to methylmalonate semialdehyde. Enzymes having 3-hydroxyisobutyrate dehydrogenase activity are classified as EC 1.1.1.31. Some 3-hydroxyisobutyrate dehydrogenases also have 3-HPDH activity. In certain embodiments, an HIBADH gene may be derived from a bacterial source. For example, an HIBADH gene may be derived from an A. faecalis M3A gene encoding the amino acid sequence set forth in SEQ ID NO: 28, a P. putida KT2440 or E23440 mmsB gene encoding the amino acid sequence set forth in SEQ ID NO: 30 or SEQ ID NO: 31, respectively, or a P. aeruginosa PAO1 mmsB gene encoding the amino acid sequence set forth in SEQ ID NO: 32. In certain embodiments, an HIBADH gene may encode an amino acid sequence with at least 50%, at least 60%, at least 70%, at least 80%, at least 85%, at least 90%, at least 95%, at least 97%, or at least 99% sequence identity to the amino acid sequence set forth in SEQ ID NOs: 28, 30, 31, or 32.

[0233] A “4-hydroxybutyrate dehydrogenase gene” as used herein refers to any gene that encodes a polypeptide with 4-hydroxybutyrate dehydrogenase activity, meaning the ability to catalyze the conversion of 4-hydroxybutanoate to succinate semialdehyde. Enzymes having 4-hydroxybutyrate dehydrogenase activity are classified as EC 1.1.1.61. Some 4-hydroxybutyrate dehydrogenases also have 3-HPDH activity. In certain embodiments, a 4-hydroxybutyrate dehydrogenase gene may be derived from a bacterial source. For example, a 4-hydroxybutyrate dehydrogenase gene may be derived from a R. eutropha H16 4hbd gene encoding the amino acid sequence set forth in SEQ ID NO: 33 or a C. kluyveri DSM 555 hbd gene encoding the amino acid sequence set forth in SEQ ID NO: 34. In other embodiments, the gene may encode an amino acid sequence with at least 50%, at least 60%, at least 70%, at least 80%, at least 85%, at least 90%, at least 95%, at least 97%, or at least 99% sequence identity to the amino acid sequence set forth in SEQ ID NOs: 33 or 34.

[0234] A “PEP carboxykinase gene” or “PCK gene” as used herein refers to any gene that encodes a polypeptide with PEP carboxykinase activity, meaning the ability to catalyze the conversion of PEP, CO₂, and ADP or GDP to OAA and ATP or GTP, or vice versa. Enzymes having PEP carboxykinase activity are classified as EC 4.1.1.32 (GTP/GDP utilizing) and EC 4.1.1.49 (ATP/ADP utilizing). In certain embodiments, a PCK gene may be derived from a yeast source. In other embodiments, a PCK gene may be derived from a bacterial source, and in certain of these embodiments the gene may be derived from a bacteria in which the PCK reaction favors the production of OAA rather than the more common form of the reaction where decarboxylation is dominant. For example, a PCK gene may be derived from an M. succiniciproducens PCK gene encoding the amino acid sequence set forth in SEQ ID NO: 35, an A. succiniciproducens PCK gene encoding the amino acid sequence set forth in SEQ ID NO: 36, an A. succinogenes PCK gene encoding the amino acid sequence set forth in SEQ ID NO: 37, or an R. eutropha PCK gene encoding the amino acid sequence set forth in SEQ ID NO: 38. In other embodiments, a PCK gene has undergone one or more mutations versus the native gene from which it was derived, such that the resultant gene encodes a polypeptide that preferably catalyzes the conversion of PEP to OAA. For example, a PCK gene may be derived from an E. coli K12 strain PCK gene encoding the amino acid sequence set forth in SEQ ID NO: 39, where the gene has been mutated to preferably catalyze the conversion of PEP to OAA. In other embodiments the conversion of PEP to OAA is catalyzed by a PEP carboxytransphosphorylase such as is found in propionic acid bacteria (e.g., P. shermanii, A. woodii) which use inorganic phosphate and diphosphate rather than ATP/ADP or GTP/GDP.

[0235] A “malate dehydrogenase gene” as used herein refers to any gene that encodes a polypeptide with malate dehydrogenase activity, meaning the ability to catalyze the conversion of OAA to malate. In certain embodiments, a malate dehydrogenase gene may be derived from a bacterial or yeast source.

[0236] A “malate decarboxylase gene” as used herein refers to any gene that encodes a polypeptide with malate decarboxylase activity, meaning the ability to catalyze the conversion of malate to 3-HP. Malate decarboxylase activity is not known to occur naturally. Therefore, a malate decarboxylase gene may be derived by incorporating one or more mutations into a native source gene that encodes a polypeptide with acetolactate decarboxylase activity. Polypeptides with acetolactate decarboxylase activity catalyze the conversion of 2-hydroxy-2-methyl-3-oxobutanoate to 2-acetoin, and are classified as EC 4.1.1.5. In certain embodiments, a malate decarboxylase gene may be derived from a bacterial source. For example, a malate decarboxylase gene may be derived from an L. lactis aldB gene encoding the amino acid sequence set forth in SEQ ID NO: 40, an S. thermophilus aldB gene encoding the amino acid sequence set forth in SEQ ID NO: 41, a B. brevis aldB gene encoding the amino acid sequence set forth in SEQ ID NO: 42, or a E. aerogenes budA gene encoding the amino acid sequence set forth in SEQ ID NO: 43.

[0237] An “alpha-ketoglutarate (AKG) decarboxylase gene” or “KGD gene” as used herein refers to any gene that encodes a polypeptide with alpha-ketoglutarate decarboxylase activity, meaning the ability to catalyze the conversion of alpha-ketoglutarate (2-oxoglutarate) to succinate semialdehyde. Enzymes having AKG decarboxylase activity are classified as EC 4.1.1.71. A KGD gene may be used to derive a gene encoding a polypeptide capable of catalyzing the conversion of OAA to malonate semialdehyde. This activity may be found in a native KGD gene, or it may derived by incorporating one or more mutations into a native KGD gene. In certain embodiments, a KGD gene may be derived from a bacterial source. For example, a KGD gene may be derived from a M. tuberculosis KGD gene encoding the amino acid sequence set forth in SEQ ID NO: 44, a B. japonicum KGD gene encoding the amino acid sequence set forth in SEQ ID NO: 45, or a M. loti (aka Rhizobium loti) KGD gene encoding the amino acid sequence set forth in SEQ ID NO: 46.

[0238] A “branched-chain alpha-keto acid decarboxylase gene” or “BCKA gene” as used herein refers to any gene that encodes a polypeptide with branched-chain alpha-keto acid decarboxylase activity, which can serve to decarboxylate a range of alpha-keto acids from three to six carbons in length. Enzymes having BCKA activity are classified as EC 4.1.1.72. A BCKA gene may be used to derive a gene encoding a polypeptide capable of catalyzing the conversion of OAA to malonate semialdehyde. This activity may be found in a native BCKA gene, or it may be derived by incorporating one or more mutations into a native BCKA gene. In certain embodiments, a BCKA gene may be derived from a bacterial source. For example, a BCKA gene may be derived from a L. lactis kdcA gene encoding the amino acid sequence set forth in SEQ ID NO: 47.

[0239] An “indolepyruvate decarboxylase gene” or “IPDA gene” as used herein refers to any gene that encodes a polypeptide with indolepyruvate decarboxylase activity, meaning the ability to catalyze the conversion of indolepyruvate to indoleacetaldehyde. Enzymes having IPDA activity are classified as EC 4.1.1.74. An IPDA gene may be used to derive a gene encoding a polypeptide capable of catalyzing the conversion of OAA to malonate semialdehyde. This activity may be found in a native IPDA gene, or it may be derived by incorporating one or more mutations into a native IPDA gene. In certain embodiments, an indolepyruvate decarboxylase gene may be derived from a yeast, bacterial, or plant source.

[0240] A “pyruvate decarboxylase gene” or “PDC gene” as used herein refers to any gene that encodes a polypeptide with pyruvate decarboxylase activity, meaning the ability to catalyze the conversion of pyruvate to acetaldehyde. Enzymes having PDC activity are classified as EC 4.1.1.1. In preferred embodiments, a PDC gene that is incorporated into a recombinant cell as provided herein has undergone one or more mutations versus the native gene from which it was derived such that the resultant gene encodes a polypeptide capable of catalyzing the conversion of OAA to malonate semialdehyde. In certain embodiments, a PDC gene may be derived from a bacterial source. For example, a PDC gene may be derived from a Z. mobilis PDC gene encoding the amino acid sequence set forth in SEQ ID NO: 52 or an A. pasteurianus PDC gene encoding the amino acid sequence set forth in SEQ ID NO: 53. In other embodiments, a PDC gene may be derived from a yeast source. For example, a PDC gene may be derived from an S. cerevisiae PDC1 gene encoding the amino acid sequence set forth in SEQ ID NO: 50, an I. orientalis PDC gene encoding the amino acid sequence set forth in SEQ ID NO: 49, or a K. lactis PDC encoding the amino acid sequence set forth in SEQ ID NO: 51. In certain embodiments, a PDC gene derived from the I. orientalis PDC gene may comprise the nucleotide sequence set forth in SEQ ID NO: 48 or a nucleotide sequence with at least 50%, at least 60%, at least 70%, at least 80%, at least 85%, at least 90%, at least 95%, at least 97%, or at least 99% sequence identity to the nucleotide sequence set forth in SEQ ID NO: 48.

[0241] A “benzoylformate decarboxylase” gene as used herein refers to any gene that encodes a polypeptide with benzoylformate decarboxylase activity, meaning the ability to catalyze the conversion of benzoylformate to benzaldehyde. Enzymes having benzoylformate decarboxylase activity are classified as EC 4.1.1.7. In preferred embodiments, a benzoylformate decarboxylase gene that is incorporated into a recombinant cell as provided herein has undergone one or more mutations versus the native gene from which it was derived such that the resultant gene encodes a polypeptide capable of catalyzing the conversion of OAA to malonate semialdehyde. In certain embodiments, a benzoylformate decarboxylase gene may be derived from a bacterial source. For example, a benzoylformate decarboxylase gene may be derived from a P. putida mdlC gene encoding the amino acid sequence set forth in SEQ ID NO: 54, a P. aeruginosa mdlC gene encoding the amino acid sequence set forth in SEQ ID NO: 55, a P. stutzeri dpgB gene encoding the amino acid sequence set forth in SEQ ID NO: 56, or a P. fluorescens ilvB-1 gene encoding the amino acid sequence set forth in SEQ ID NO: 57.

[0242] An “OAA formatelyase gene” as used herein refers to any gene that encodes a polypeptide with OAA formatelyase activity, meaning the ability to catalyze the conversion of an acylate ketoacid to its corresponding CoA derivative. A polypeptide encoded by an OAA formatelyase gene may have activity on pyruvate or on another ketoacid. In certain embodiments, an OAA formatelyase gene encodes a polypeptide that converts OAA to malonyl-CoA.

[0243] A “malonyl-CoA reductase gene” as used herein refers to any gene that encodes a polypeptide with malonyl-CoA reductase activity, meaning the ability to catalyze the conversion of malonyl-CoA to malonate semialdehyde (also referred to as Co-A acylating malonate semialdehyde dehydrogenase activity). In certain embodiments, a malonyl-CoA reductase gene may be derived from a bifunctional malonyl-CoA reductase gene which also has the ability to catalyze the conversion of malonate semialdehyde to 3-HP. In certain of these embodiments, a malonyl-CoA reductase gene may be derived from a bacterial source. For example, a malonyl-CoA reductase gene may be derived from a C. aurantiacus malonyl-CoA reductase gene encoding the amino acid sequence set forth in SEQ ID NO: 58, an R. castenholzii malonyl-CoA reductase gene encoding the amino acid sequence set forth in SEQ ID NO: 59, or an Erythrobacter sp. NAP1 malonyl-CoA reductase gene encoding the amino acid sequence set forth in SEQ ID NO: 60. In other embodiments, a malonyl-CoA reductase gene may be derived from a malonyl-CoA reductase gene encoding a polypeptide that only catalyzes the conversion of malonyl-CoA to malonate semialdehyde. For example, a malonyl-CoA reductase gene may be derived from an M. sedula Msed_0709 gene encoding the amino acid sequence set forth in SEQ ID NO: 61 or a S. tokodaii malonyl-CoA reductase encoding the amino acid sequence set forth in SEQ ID NO: 62.

[0244] A “pyruvate dehydrogenase gene” or “PDH gene” as used herein refers to any gene that encodes a polypeptide with pyruvate dehydrogenase activity, meaning the ability to catalyze the conversion of pyruvate to acetyl-CoA. In certain embodiments, a PDH gene may be derived from a yeast source. For example, a PDH gene may be derived from an S. cerevisiae LAT1, PDA1, PDB1, or LPD gene encoding the amino acid sequence set forth in SEQ ID NOs: 63-66, respectively. In other embodiments, a PDH gene may be derived from a bacterial source. For example, a PDH gene may be derived from an E. coli strain K12 substr. MG1655 aceE, aceF, or lpd gene encoding the amino acid sequence set forth in SEQ ID NOs: 67-69, respectively, or a B. subtilis pdhA, pdhB, pdhC, or pdhD gene encoding the amino acid sequence set forth in SEQ ID NOs: 70-73, respectively.

[0245] An “acetyl-CoA carboxylase gene” or “ACC gene” as used herein refers to any gene that encodes a polypeptide with acetyl-CoA carboxylase activity, meaning the ability to catalyze the conversion of acetyl-CoA to malonyl-CoA. Enzymes having acetyl-CoA carboxylase activity are classified as EC 6.4.1.2. In certain embodiments, an acetyl-CoA carboxylase gene may be derived from a yeast source. For example, an acetyl-CoA carboxylase gene may be derived from an S. cerevisiae ACC1 gene encoding the amino acid sequence set forth in SEQ ID NO: 74. In other embodiments, an acetyl-CoA carboxylase gene may be derived from a bacterial source. For example, an acetyl-CoA carboxylase gene may be derived from an E. coli accA, accB, accC, or accD gene encoding the amino acid sequence set forth in SEQ ID NOs: 75-78, respectively, or a C. aurantiacus accA, accB, accC, or accD gene encoding the amino acid sequence set forth in SEQ ID NOs: 79-82, respectively.

[0246] An “alanine dehydrogenase gene” as used herein refers to any gene that encodes a polypeptide with alanine dehydrogenase activity, meaning the ability to catalyze the NAD-dependent reductive amination of pyruvate to alanine. Enzymes having alanine dehydrogenase activity are classified as EC 1.4.1.1. In certain embodiments, an alanine dehydrogenase gene may be derived from a bacterial source. For example, an alanine dehydrogenase gene may be derived from a B. subtilis alanine dehydrogenase gene encoding the amino acid sequence set forth in SEQ ID NO: 83.

[0247] A “pyruvate/alanine aminotransferase gene” as used herein refers to any gene that encodes a polypeptide with pyruvate/alanine aminotransferase activity, meaning the ability to catalyze the conversion of pyruvate and L-glutamate to alanine and 2-oxoglutarate. In certain embodiments, a pyruvate/alanine aminotransferase gene is derived from a yeast source. For example, a pyruvate/alanine aminotransferase gene may be derived from an S. pombe pyruvate/alanine aminotransferase gene encoding the amino acid sequence set forth in SEQ ID NO: 84 or an S. cerevisiae ALT2 gene encoding the amino acid sequence set forth in SEQ ID NO: 85.

[0248] An “alanine 2,3 aminomutase gene” or “AAM gene” as used herein refers to a gene that encodes a polypeptide with alanine 2,3 aminomutase activity, meaning the ability to catalyze the conversion of alanine to β-alanine. Alanine 2,3 aminomutase activity is not known to occur naturally. Therefore, an alanine 2,3 aminomutase gene can be derived by incorporating one or more mutations into a native source gene that encodes a polypeptide with similar activity such as lysine 2,3 aminomutase activity (see, e.g., U.S. Pat. No. 7,309,597). In certain embodiments, the native source gene may be a B. subtilis lysine 2,3 aminomutase gene encoding the amino acid sequence set forth in SEQ ID NO: 86, a P. gingivalis lysine 2,3 aminomutase gene encoding the amino acid sequence set forth in SEQ ID NO: 87, or a F. nucleatum (ATCC-10953) lysine 2,3 aminomutase gene encoding the amino acid sequence set forth in SEQ ID NO: 88.

[0249] A “CoA transferase gene” as used herein refers to any gene that encodes a polypeptide with CoA transferase activity, which in one example includes the ability to catalyze the conversion of β-alanine to β-alanyl-CoA and/or the conversion of lactate to lactyl-CoA. In certain embodiments, a CoA transferase gene may be derived from a yeast source. In other embodiments, a CoA transferase gene may be derived from a bacterial source. For example, a CoA transferase gene may be derived from an M. elsdenii CoA transferase gene encoding the amino acid sequence set forth in SEQ ID NO: 89.

[0250] A “CoA synthetase gene” as used herein refers to any gene that encodes a polypeptide with CoA synthetase activity. In one example this includes the ability to catalyze the conversion of β-alanine to β-alanyl-CoA. In another example, this includes the ability to catalyze the conversion of lactate to lactyl-CoA. In certain embodiments, a CoA synthetase gene may be derived from a yeast source. For example, a CoA synthetase gene may be derived from an S. cerevisiae CoA synthetase gene. In other embodiments, a CoA synthetase gene may be derived from a bacterial source. For example, a CoA synthetase gene may be derived from an E. coli CoA synthetase, R. sphaeroides, or S. enterica CoA synthetase gene.

[0251] A “β-alanyl-CoA ammonia lyase gene” as used herein refers to any gene that encodes a polypeptide with β-alanyl-CoA ammonia lyase activity, meaning the ability to catalyze the conversion of β-alanyl-CoA to acrylyl-CoA. In certain embodiments, a β-alanyl-CoA ammonia lyase gene may be derived from a bacterial source, such as a C. propionicum β-alanyl-CoA ammonia lyase gene encoding the amino acid sequence set forth in SEQ ID NO: 90.

[0252] A “3-HP-CoA dehydratase gene” or “acrylyl-CoA hydratase gene” as used herein refers to any gene that encodes a polypeptide with 3-HP-CoA dehydratase gene activity, meaning the ability to catalyze the conversion of acrylyl-CoA to 3-HP-CoA. Enzymes having 3-HP-CoA dehydratase activity are classified as EC 4.2.1.116. In certain embodiments, a 3-HP-CoA dehydratase gene may be derived from a yeast or fungal source, such as a P. sojae 3-HP-CoA dehydratase gene encoding the amino acid sequence set forth in SEQ ID NO: 91. In other embodiments, a 3-HP-CoA dehydratase gene may be derived from a bacterial source. For example, a 3-HP-CoA dehydratase gene may be derived from a C. aurantiacus 3-HP-CoA dehydratase gene encoding the amino acid sequence set forth in SEQ ID NO: 92, an R. rubrum 3-HP-CoA dehydratase gene encoding the amino acid sequence set forth in SEQ ID NO: 93, or an R. capsulates 3-HP-CoA dehydratase gene encoding the amino acid sequence set forth in SEQ ID NO: 94. In still other embodiments, a 3-HP-CoA dehydratase gene may be derived from a mammalian source. For example, a 3-HP-CoA dehydratase gene may be derived from a H. sapiens 3-HP-CoA dehydratase gene encoding the amino acid sequence set forth in SEQ ID NO: 95.

[0253] A “3-HP-CoA hydrolase gene” as used herein refers to any gene that encodes a polypeptide with 3-HP-CoA hydrolase activity, meaning the ability to catalyze the conversion of 3-HP-CoA to 3-HP. In certain embodiments, a 3-HP-CoA gene may be derived from a yeast or fungal source. In other embodiments, a 3-HP-CoA gene may be derived from a bacterial or mammalian source.

[0254] A “3-hydroxyisobutyryl-CoA hydrolase gene” as used herein refers to any gene that encodes a polypeptide with 3-hydroxyisobutyryl-CoA hydrolase activity, which in one example includes the ability to catalyze the conversion of 3-HP-CoA to 3-HP. In certain embodiments, a 3-hydroxyisobutyryl-CoA hydrolase gene may be derived from a bacterial source, such as a P. fluorescens 3-hydroxyisobutyryl-CoA hydrolase gene encoding the amino acid sequence set forth in SEQ ID NO: 96 or a B. cereus 3-hydroxyisobutyryl-CoA hydrolase gene encoding the amino acid sequence set forth in SEQ ID NO: 97. In other embodiments, a 3-hydroxyisobutyryl-CoA hydrolase gene may be derived from a mammalian source, such as a H. sapiens 3-hydroxyisobutyryl-CoA hydrolase gene encoding the amino acid sequence set forth in SEQ ID NO: 98.

[0255] A “lactate dehydrogenase gene” or “LDH gene” as used herein refers to any gene that encodes a polypeptide with lactate dehydrogenase activity, meaning the ability to catalyze the conversion of pyruvate to lactate. In certain embodiments, an LDH gene may be derived from a fungal, bacterial, or mammalian source.

[0256] A “lactyl-CoA dehydratase gene” as used herein refers to any gene that encodes a polypeptide with lactyl-CoA dehydratase activity, meaning the ability to catalyze the conversion of lactyl-CoA to acrylyl-CoA. In certain embodiments, a lactyl-CoA dehydratase gene may be derived from a bacterial source. For example, a lactyl-CoA dehydratase gene may be derived from an M. elsdenii lactyl-CoA dehydratase E1, Ella, or Ellb subunit gene encoding the amino acid sequence set forth in SEQ ID NOs: 99-101.

[0257] An “aldehyde dehydrogenase gene” as used herein refers to any gene that encodes a polypeptide with aldehyde dehydrogenase activity, which in one example includes the ability to catalyze the conversion of 3-HPA to 3-HP and vice versa. In certain embodiments, an aldehyde dehydrogenase may be derived from a bacterial source, such as an E. coli aldH gene encoding the amino acid sequence set forth in SEQ ID NO: 103 or a K. pneumoniae aldehyde dehydrogenase gene encoding the amino acid sequence set forth in SEQ ID NO: 104. In other embodiments, an aldehyde dehydrogenase gene may be derived from a yeast source, such as an S. cerevisiae aldehyde dehydrogenase gene encoding the amino acid sequence set forth in SEQ ID NO: 102 or an I. orientalis aldehyde dehydrogenase gene encoding the amino acid sequence set forth in SEQ ID NOs: 122, 124, or 126.

[0258] A “glycerol dehydratase gene” as used herein refers to any gene that encodes a polypeptide with glycerol dehydratase activity, meaning the ability to catalyze the conversion of glycerol to 3-HPA. In certain embodiments, a glycerol dehydratase gene may be derived from a bacterial source, such as a K. pneumonia or C. freundii glycerol dehydratase gene.

[0259] The enzymes of the selected active 3-HP pathway, and activities thereof, can be detected using methods known in the art or as described herein. These detection methods may include use of specific antibodies, formation of an enzyme product, or disappearance of an enzyme substrate. See, for example, Sambrook et al., Molecular Cloning: A Laboratory Manual, Third Ed., Cold Spring Harbor Laboratory, New York (2001); Ausubel et al., Current Protocols in Molecular Biology, John Wiley and Sons, Baltimore, Md. (1999); and Hanai et al., Appl. Environ. Microbiol. 73:7814-7818 (2007)).

[0260] The recombinant cells described herein can further contain lipase or esterase activity, for example due to expression of a heterologous polynucleotide encoding a lipase or esterase (EC 3.1.1.-). Such cells can be used to produce an ester of 3-HP, such as methyl 3-hydroxypropionate, ethyl 3-hydroxypropionate, propyl 3-hydroxypropionate, butyl 3-hydroxypropionate, or 2-ethylhexyl 3-hydroxypropionate. The cells can further contain esterase activity, for example due to expression of a heterologous polynucleotide encoding an esterase. Such cells can be used to produce polymerized 3-HP. The cells can further contain alcohol dehydrogenase activity (EC 1.1.1.1), aldehyde dehydrogenase activity (EC 1.2.1.-), or both, for example due to expression of a heterologous polynucleotide encoding an alcohol dehydrogenase, aldehyde dehydrogenase, or both. Such cells can be used to produce 1,3-propanediol.

### Gene Disruptions

[0261] The recombinant cell may also comprise one or more (e.g., two, several) gene disruptions, e.g., to divert sugar metabolism from undesired products to 3-HP. In some aspects, the recombinant host cells produce a greater amount of 3-HP compared to the cell without the one or more disruptions when cultivated under identical conditions. In some aspects, one or more of the disrupted endogenous genes are inactivated.

[0262] In certain embodiments, the recombinant cells provided herein comprise a disruption of one or more endogenous genes encoding an enzyme involved in ethanol fermentation, including for example pyruvate decarboxylase (PDC, converts pyruvate to acetaldehyde) and/or alcohol dehydrogenase (ADH, converts acetaldehyde to ethanol) genes. These modifications decrease the ability of the cell to produce ethanol, thereby maximizing 3-HP production. However, in certain embodiments the recombinant cells provided herein may be engineered to co-produce 3-HP and ethanol. In those embodiments, endogenous genes encoding an enzyme involved in ethanol fermentation are preferably not disrupted, and in certain embodiments the cells may comprise one or more heterologous genes that increase ethanol production.

[0263] In some embodiments, the recombinant cells comprise a disruption to an endogenous gene encoding a PDC having at least 75%, e.g., at least 80%, at least 85%, at least 90%, at least 95%, at least 96%, at least 97%, at least 98%, at least 99%, or 100% sequence identity to SEQ ID NO: 154. In some embodiments, the endogenous gene encodes a PDC having an amino acid sequence comprising or consisting of SEQ ID NO: 154. In some embodiments, the coding sequence of the endogenous gene encoding the PDC has at least 75%, e.g., at least 80%, at least 85%, at least 90%, at least 95%, at least 96%, at least 97%, at least 98%, at least 99%, or 100% sequence identity to SEQ ID NO: 153. In some embodiments, the coding sequence of the endogenous gene encoding the PDC comprises or consists of SEQ ID NO: 153. In some embodiments, the endogenous gene encoding the PDC is inactivated.

[0264] In certain embodiments, the recombinant cells provided herein comprise a disruption of one or more endogenous genes encoding enzymes involved in producing alternate fermentative products such as glycerol or other byproducts such as lactate, acetate or diols. For example, the cells provided herein may comprise a disruption of one or more of glycerol 3-phosphate dehydrogenase (GPD, catalyzes reaction of dihydroxyacetone phosphate to glycerol 3-phosphate), pyruvate reductase (catalyzes the reduction of pyruvate to D-lactate), glycerol 3-phosphatase (GPP, catalyzes conversion of glycerol-3 phosphate to glycerol), glycerol kinase (catalyzes conversion of glycerol 3-phosphate to glycerol), dihydroxyacetone kinase (catalyzes conversion of dihydroxyacetone phosphate to dihydroxyacetone), glycerol dehydrogenase (catalyzes conversion of dihydroxyacetone to glycerol), aldehyde dehydrogenase (ALD, e.g., converts acetaldehyde to acetate or 3-HP to 3-HPA), and butanediol dehydrogenase (catalyzes conversion of butanediol to acetoin and vice versa) genes.

[0265] In some embodiments, the recombinant cells comprise a disruption to an endogenous gene encoding a GPD having at least 75%, e.g., at least 80%, at least 85%, at least 90%, at least 95%, at least 96%, at least 97%, at least 98%, at least 99%, or 100% sequence identity to SEQ ID NO: 156. In some embodiments, the endogenous gene encodes a GPD having an amino acid sequence comprising or consisting of SEQ ID NO: 156. In some embodiments, the coding sequence of the endogenous gene encoding the GPD has at least 75%, e.g., at least 80%, at least 85%, at least 90%, at least 95%, at least 96%, at least 97%, at least 98%, at least 99%, or 100% sequence identity to SEQ ID NO: 155. In some embodiments, the coding sequence of the endogenous gene encoding the GPD comprises or consists of SEQ ID NO: 155. In some embodiments, the endogenous gene encoding the GPD is inactivated.

[0266] In some embodiments, the recombinant cells comprise a disruption to an endogenous gene encoding a pyruvate reductase having at least 75%, e.g., at least 80%, at least 85%, at least 90%, at least 95%, at least 96%, at least 97%, at least 98%, at least 99%, or 100% sequence identity to SEQ ID NO: 205 (e.g., as described in U.S. Ser. No. 62/126,377, filed Feb. 27, 2015, the content of which is hereby incorporated by reference). In some embodiments, the endogenous gene encodes a pyruvate reductase having an amino acid sequence comprising or consisting of SEQ ID NO: 205. In some embodiments, the coding sequence of the endogenous gene encoding the pyruvate reductase has at least 75%, e.g., at least 80%, at least 85%, at least 90%, at least 95%, at least 96%, at least 97%, at least 98%, at least 99%, or 100% sequence identity to SEQ ID NO: 204. In some embodiments, the coding sequence of the endogenous gene encoding the pyruvate reductase comprises or consists of SEQ ID NO: 204. In some embodiments, the endogenous gene encoding the pyruvate reductase is inactivated.

[0267] In certain embodiments, the recombinant cells provided herein comprise a disruption of one or more endogenous genes encoding enzymes that catalyze a reverse reaction in a 3-HP pathway, including for example PEP carboxykinase (PCK), enzymes with OAA decarboxylase activity, or CYB2A or CYB2B (catalyzes the conversion of lactate to pyruvate). PCK catalyzes the conversion of PEP to OAA and vice versa, but exhibits a preference for the OAA to PEP reaction. To reduce the conversion of OAA to PEP, one or more copies of a native PCK gene may be disrupted. In certain embodiments, cells in which one or more native PCK genes have been disrupted may express one or more heterologous PCK genes that have been mutated to encode a polypeptide favoring the conversion of PEP to OAA. OAA decarboxylase catalyzes the conversion of OAA to pyruvate. Enzymes with OAA decarboxylase activity have been identified, such as that coded by the Entner-Doudoroff aldolase (eda) gene in E. coli and malic enzyme (MAE) in yeast and fungi. To reduce OAA decarboxylase activity, one or more copies of a native gene encoding an enzyme with OAA decarboxylase activity may be disrupted. In certain embodiments, cells in which one or more native OAA decarboxylation genes have been disrupted may express one or more heterologous OAA decarboxylation genes that have been mutated to encode a polypeptide that catalyzes the conversion of pyruvate to OAA.

[0268] In certain embodiments, the recombinant cells provided herein comprise a disruption to one or more genes selected from dse2, scw11, eaf3, sed1, and sam2. (See, e.g., Suzuki et al, J. Biosci. Bioeng. 2013, 115, 467-474; and Dato et al., Microbial Cell Factories, 2014, 13, 147).

[0269] In certain embodiments, the recombinant cells provided herein comprise a disruption of one or more endogenous genes encoding an enzyme involved in an undesirable reaction with a 3-HP pathway product or intermediate. Examples of such genes include those encoding an enzyme that converts 3-HP to an aldehyde of 3-HP, which are known to be toxic to certain cells.

[0270] In certain embodiments, the recombinant cells provided herein comprise a disruption of one or more endogenous genes encoding an enzyme that has a neutral effect on a 3-HP pathway, including for example GAL6 (negative regulator of the GAL system that converts galactose to glucose). Disruption of neutral genes allows for insertion of one or more heterologous genes without affecting native pathways.

[0271] Modeling can also be used to design gene disruptions that additionally optimize utilization of the pathway (see, for example, U.S. 2002/0012939, U.S. 2003/0224363, U.S. 2004/0029149, U.S. 2004/0072723, U.S. 2003/0059792, U.S. 2002/0168654, U.S. 2004/0009466, and U.S. Pat. No. 7,127,379). Modeling analysis allows reliable predictions of the effects on cell growth of shifting the metabolism towards more efficient production of 3-HP. One exemplary computational method for identifying and designing metabolic alterations favoring biosynthesis of a desired product is the OptKnock computational framework, Burgard et al., 2003, Biotechnol. Bioeng. 84: 647-657.

[0272] The recombinant cells comprising a gene disruption may be constructed using methods well known in the art, including those methods described herein. A portion of the operon can be disrupted such as one or more (e.g., two, several) coding regions or a control sequence required for expression of the coding regions. Such a control sequence of the operon may be a promoter sequence or a functional part thereof, i.e., a part that is sufficient for affecting expression of the operon. For example, a promoter sequence may be inactivated resulting in no expression or a weaker promoter may be substituted for the native promoter sequence to reduce expression of the coding sequences. Other control sequences for possible modification include, but are not limited to, a leader, propeptide sequence, signal sequence, transcription terminator, and transcriptional activator.

[0273] The recombinant cells comprising a gene disruption may be constructed by gene deletion techniques to eliminate or reduce expression of the gene. Gene deletion techniques enable the partial or complete removal of the gene thereby eliminating their expression. In such methods, deletion of the gene is accomplished by homologous recombination using a plasmid that has been constructed to contiguously contain the 5′ and 3′ regions flanking the gene.

[0274] The recombinant cells comprising a gene disruption may also be constructed by introducing, substituting, and/or removing one or more (e.g., two, several) nucleotides in the gene or a control sequence thereof required for the transcription or translation thereof. For example, nucleotides may be inserted or removed for the introduction of a stop codon, the removal of the start codon, or a frame-shift of the open reading frame. Such a modification may be accomplished by site-directed mutagenesis or PCR generated mutagenesis in accordance with methods known in the art. See, for example, Botstein and Shortle, 1985, Science 229: 4719; Lo et al., 1985, Proc. Natl. Acad. Sci. U.S.A. 81: 2285; Higuchi et al., 1988, Nucleic Acids Res 16: 7351; Shimada, 1996, Meth. Mol. Biol. 57: 157; Ho et al., 1989, Gene 77: 61; Horton et al., 1989, Gene 77: 61; and Sarkar and Sommer, 1990, BioTechniques 8: 404.

[0275] The recombinant cells comprising a gene disruption may also be constructed by inserting into the gene a disruptive nucleic acid construct comprising a nucleic acid fragment homologous to the gene that will create a duplication of the region of homology and incorporate construct DNA between the duplicated regions. Such a gene disruption can eliminate gene expression if the inserted construct separates the promoter of the gene from the coding region or interrupts the coding sequence such that a non-functional gene product results. A disrupting construct may be simply a selectable marker gene accompanied by 5′ and 3′ regions homologous to the gene. The selectable marker enables identification of transformants containing the disrupted gene.

[0276] The recombinant cells comprising a gene disruption may also be constructed by the process of gene conversion (see, for example, Iglesias and Trautner, 1983, Molecular General Genetics 189: 73-76). For example, in the gene conversion method, a nucleotide sequence corresponding to the gene is mutagenized in vitro to produce a defective nucleotide sequence, which is then transformed into the recombinant strain to produce a defective gene. By homologous recombination, the defective nucleotide sequence replaces the endogenous gene. It may be desirable that the defective nucleotide sequence also comprises a marker for selection of transformants containing the defective sequence.

[0277] The recombinant cells comprising a gene disruption may be further constructed by random or specific mutagenesis using methods well known in the art, including, but not limited to, chemical mutagenesis (see, for example, Hopwood, The Isolation of Mutants in Methods in Microbiology (J. R. Norris and D. W. Ribbons, eds.) pp. 363-433, Academic Press, New York, 1970). Modification of the gene may be performed by subjecting the parent strain to mutagenesis and screening for mutant strains in which expression of the gene has been reduced or inactivated. The mutagenesis, which may be specific or random, may be performed, for example, by use of a suitable physical or chemical mutagenizing agent, use of a suitable oligonucleotide, or subjecting the DNA sequence to PCR generated mutagenesis. Furthermore, the mutagenesis may be performed by use of any combination of these mutagenizing methods.

[0278] Examples of a physical or chemical mutagenizing agent suitable for the present purpose include ultraviolet (UV) irradiation, hydroxylamine, N-methyl-N′-nitro-N-nitrosoguanidine (MNNG), N-methyl-N′-nitrosogaunidine (NTG) O-methyl hydroxylamine, nitrous acid, ethyl methane sulphonate (EMS), sodium bisulphite, formic acid, and nucleotide analogues. When such agents are used, the mutagenesis is typically performed by incubating the parent strain to be mutagenized in the presence of the mutagenizing agent of choice under suitable conditions, and selecting for mutants exhibiting reduced or no expression of the gene.

[0279] A nucleotide sequence homologous or complementary to a gene described herein may be used from other microbial sources to disrupt the corresponding gene in a recombinant strain of choice.

[0280] In one aspect, the modification of a gene in the recombinant cell is unmarked with a selectable marker. Removal of the selectable marker gene may be accomplished by culturing the mutants on a counter-selection medium. Where the selectable marker gene contains repeats flanking its 5′ and 3′ ends, the repeats will facilitate the looping out of the selectable marker gene by homologous recombination when the mutant strain is submitted to counter-selection. The selectable marker gene may also be removed by homologous recombination by introducing into the mutant strain a nucleic acid fragment comprising 5′ and 3′ regions of the defective gene, but lacking the selectable marker gene, followed by selecting on the counter-selection medium. By homologous recombination, the defective gene containing the selectable marker gene is replaced with the nucleic acid fragment lacking the selectable marker gene. Other methods known in the art may also be used.

### Methods of Producing 3-HP and Related Compounds

[0281] The recombinant cells described herein may be used for the production of 3-HP. In one aspect is a method of producing 3-HP, comprising: (a) cultivating any one of the recombinant cells described herein (e.g., a recombinant host cell comprising an active 3-HP pathway and a heterologous polynucleotide encoding an aminotransferase) in a medium under suitable conditions to produce the 3-HP; and (b) recovering the 3-HP.

[0282] The recombinant cells comprising an active 3-HP pathway may be cultivated in a nutrient medium suitable for 3-HP production using methods well known in the art. For example, the cells may be cultivated by shake flask cultivation, and small-scale or large-scale fermentation (including continuous, batch, fed-batch, or solid state fermentations) in laboratory or industrial fermentors performed in a suitable fermentation medium and under conditions allowing 3-HP production.

[0283] The recombinant cells may produce 3-HP in a fermentable medium comprising any one or more (e.g., two, several) sugars, such as glucose, fructose, sucrose, cellobiose, xylose, xylulose, arabinose, mannose, galactose, and/or soluble oligosaccharides. The carbon source may be a twelve carbon sugar such as sucrose, a hexose sugar such as glucose or fructose, glycan or other polymer of glucose, glucose oligomers such as maltose, maltotriose and isomaltotriose, panose, and fructose oligomers. If the cell is modified to impart an ability to ferment pentose sugars, the fermentation medium may include a pentose sugar such as xylose, xylan or other oligomer of xylose, and/or arabinose. Such pentose sugars are suitably hydrolysates of a hemicellulose-containing biomass. In some embodiments, the cell is unable to ferment pentose sugars and/or the fermentable medium comprises less than 1% pentose sugars. In some instances, the fermentable medium is derived from a natural source, such as sugar cane, starch, or cellulose, and may be the result of pretreating the source by enzymatic hydrolysis (saccharification). In some aspects, the fermentable medium comprises sugar cane juice. Suitable media are available from commercial suppliers, may be prepared according to published compositions (e.g., in catalogues of the American Type Culture Collection), or may be prepared from commercially available ingredients.

[0284] In addition to the appropriate carbon sources from one or more (e.g., two, several) sugar(s), the fermentable medium may contain other nutrients or stimulators known to those skilled in the art, such as macronutrients (e.g., nitrogen sources) and micronutrients (e.g., vitamins, mineral salts, and metallic cofactors). In some aspects, the carbon source can be preferentially supplied with at least one nitrogen source, such as yeast extract, N₂, peptone (e.g., Bacto™ Peptone), or soytone (e.g., Bacto™ Soytone). Non-limiting examples of vitamins include multivitamins, biotin, pantothenate, nicotinic acid, meso-inositol, thiamine, pyridoxine, para-aminobenzoic acid, folic acid, riboflavin, and Vitamins A, B, C, D, and E. Examples of mineral salts and metallic cofactors include, but are not limited to Na, P, K, Mg, S, Ca, Fe, Zn, Mn, Co, and Cu.

[0285] In some embodiments, the recombinant cells of the invention can be cultured in a chemically defined medium. In one example, the medium contains around 5 g/L ammonium sulfate, around 3 g/L potassium dihydrogen phosphate, around 0.5 g/L magnesium sulfate, trace elements, and vitamins and around 150 g/L glucose. The pH may be allowed to range freely during cultivation, or may be buffered if necessary to prevent the pH from falling below or rising above predetermined levels. In certain embodiments, the fermentation medium is inoculated with sufficient cells that are the subject of the evaluation to produce an OD₆₀₀ of about 1.0. Unless explicitly noted otherwise, OD₆₀₀ as used herein refers to an optical density measured at a wavelength of 600 nm with a 1 cm pathlength using a model DU600 spectrophotometer (Beckman Coulter).

[0286] Specific conditions used for the methods of 3-HP production may be determined by one skilled in the art in light of the teachings herein. In some aspects of the methods, the cells are cultivated for about 12 hours to about 216 hours, such as about 24 hours to about 144 hours, or about 36 hours to about 96 hours. The temperature is typically between about 25° C. to about 60° C., e.g., about 30° C. to about 40° C., about 30° C. to about 40° C., or about 40° C. to about 50° C.

[0287] Cultivation may be performed under anaerobic, substantially anaerobic (microaerobic), or aerobic conditions, as appropriate. Briefly, anaerobic refers to an environment devoid of oxygen, substantially anaerobic (microaerobic) refers to an environment in which the concentration of oxygen is less than air, and aerobic refers to an environment wherein the oxygen concentration is approximately equal to or greater than that of the air. Substantially anaerobic conditions include, for example, a culture, batch fermentation or continuous fermentation such that the dissolved oxygen concentration in the medium remains less than 10% of saturation. Substantially anaerobic conditions also includes growing or resting cells in liquid medium or on solid agar inside a sealed chamber maintained with an atmosphere of less than 1% oxygen. The percent of oxygen can be maintained by, for example, sparging the culture with a N₂/CO₂ mixture or other suitable non-oxygen gas or gases. In some embodiments, the cultivation is performed under anaerobic conditions or substantially anaerobic conditions.

[0288] In one example, the concentration of cells in the fermentation medium is typically in the range of about 1 to 40, e.g., 2 to 20, or 3 to 10 gram dry cells/liter of fermentation medium during the production phase. If desired, oxygen uptake rate (OUR) can be varied throughout fermentation as a process control (see, e.g., WO03/102200). In some embodiments, the recombinant cells provided herein are cultivated under microaerobic conditions characterized by an oxygen uptake rate from 2 to 45 mmol/L/hr, e.g., 2 to 25, 2 to 20, 2 to 15, 2 to 10, 10 to 45, 15 to 40, 20 to 35, or 25 to 35 mmol/L/hr. In certain embodiments, the recombinant cells provided herein may perform especially well when cultivated under microaerobic conditions characterized by an oxygen uptake rate of from 2 to 25 mmol/L/hr. The medium may be buffered during the production phase such that the pH is maintained in a range of about 3.0 to about 7.0, or from about 4.0 to about 6.0. Suitable buffering agents are basic materials that neutralize the acid as it is formed, and include, for example, calcium hydroxide, calcium carbonate, sodium hydroxide, potassium hydroxide, potassium carbonate, sodium carbonate, ammonium carbonate, ammonia, ammonium hydroxide and the like. In general, those buffering agents that have been used in conventional fermentation processes are also suitable here.

[0289] In those embodiments where a buffered fermentation is utilized, acidic fermentation products may be neutralized to the corresponding salt as they are formed. In these embodiments, recovery of the acid involves regeneration of the free acid. This may be done by removing the cells and acidulating the fermentation broth with a strong acid such as sulfuric acid. This results in the formation of a salt by-product. For example, where a calcium salt is utilized as the neutralizing agent and sulfuric acid is utilized as the acidulating agent, gypsum is produced as a salt by-product. This by-product is separated from the broth, and the acid is recovered using techniques such as liquid-liquid extraction, distillation, absorption, and others (see, e.g., T. B. Vickroy, Vol. 3, Chapter 38 of Comprehensive Biotechnology, (ed. M. Moo-Young), Pergamon, Oxford, 1985; Datta et al., 1995, FEMS Microbiol. Rev. 16: 221-231; U.S. Pat. Nos. 4,275,234, 4,771,001, 5,132,456, 5,420,304, 5,510,526, 5,641,406, and 5,831,122, and WO 93/00440.

[0290] In other embodiments, the pH of the fermentation medium may be permitted to drop during cultivation from a starting pH that is at or above the pKa of 3-HP, typically 4.5 or higher (such as 5.5, 6.0 or 6.5), to at or below the pKa of the acid fermentation product, e.g., less than 4.5 or 4.0, such as in the range of about 1.5 to about 4.5, in the range of from about 2.0 to about 4.0, or in the range from about 2.0 to about 3.5.

[0291] In still other embodiments, fermentation may be carried out to produce a product acid by adjusting the pH of the fermentation broth to at or below the pKa of the product acid prior to or at the start of the fermentation process. The pH may thereafter be maintained at or below the pKa of the product acid throughout the cultivation. In certain embodiments, the pH may be maintained at less than 4.5 or 4.0, such as in a range of about 1.5 to about 4.5, in a range of about 2.0 to about 4.0, or in a range of about 2.0 to about 3.5.

[0292] The methods described herein can employ any suitable fermentation operation mode. For example, batch mode fermentation may be used with a close system where culture media and recombinant host cells, set at the beginning of fermentation, have no additional input except for the reagents certain reagents, e.g., for pH control, foam control or others required for process sustenance. The process described herein can also be employed in Fed-batch or continuous mode, as mentioned supra.

[0293] The methods described herein may be practiced in several bioreactor configurations, such as stirred tank, bubble column, airlift reactor and others known to those skilled in the art. The methods may be performed in free cell culture or in immobilized cell culture as appropriate. Any material support for immobilized cell culture may be used, such as alginates, fibrous bed, or argyle materials such as chrysotile, montmorillonite KSF and montmorillonite K-10.

[0294] In one aspect of the methods, the 3-HP is produced at a titer greater than about 5 g/L, e.g., greater than about 10 g/L, 25 g/L, 50 g/L, 75 g/L, 100 g/L, 125 g/L, 150 g/L, 160 g/L, 170 g/L, 180 g/L, 190 g/L, 200 g/L, 210 g/L, 225 g/L, 250 g/L, 275 g/L, 300 g/L, 325 g/L, 350 g/L, 400 g/L, or 500 g/L; or between about 10 g/L and about 500 g/L, e.g., between about 50 g/L and about 350 g/L, about 100 g/L and about 300 g/L, about 150 g/L and about 250 g/L, about 175 g/L and about 225 g/L, or about 190 g/L and about 210 g/L. In one embodiment, the 3-HP is produced at a titer greater than about 0.01 gram per gram of carbohydrate, e.g., greater than about 0.02, 0.05, 0.75, 0.1, 0.2, 0.3, 0.4, 0.5, 0.6, 0.7, 0.8, 0.9, or 1.0 gram per gram of carbohydrate.

[0295] In certain embodiments of the methods provided herein, the recombinant cells produce relatively low levels of ethanol. In certain embodiments, ethanol may be produced in a yield of 10% or less, preferably in a yield of 2% or less. In certain of these embodiments, ethanol is not detectably produced. In other embodiments, however, 3-HP and ethanol may be co-produced. In these embodiments, ethanol may be produced at a yield of greater than 10%, greater than 25%, or greater than 50%.

[0296] The 3-HP can be optionally recovered from the fermentation medium using any procedure known in the art including, but not limited to, chromatography (e.g., size exclusion chromatography, adsorption chromatography, ion exchange chromatography), electrophoretic procedures, differential solubility, osmosis, distillation, extraction (e.g., liquid-liquid extraction), pervaporation, extractive filtration, membrane filtration, membrane separation, reverse, or ultrafiltration. In one aspect, the 3-HP is separated from other fermented material and purified by conventional methods of distillation. Accordingly, in one aspect, the method further comprises purifying the recovered 3-HP by distillation.

[0297] The recombinant 3-HP may also be purified by the chemical conversion of impurities (contaminants) to products more easily removed from 3-HP by the procedures described above (e.g., chromatography, electrophoretic procedures, differential solubility, distillation, or extraction) and/or by direct chemical conversion of impurities to 3-HP. For example, in one aspect, the method further comprises purifying recovered 3-HP by converting β-alanine contaminant to 3-HP, using chemical techniques known in the art.

[0298] In some aspects of the methods, the recombinant 3-HP preparation before and/or after being optionally purified is substantially pure. With respect to the methods of producing 3-HP, “substantially pure” intends a recovered preparation that contains no more than 15% impurity, wherein impurity intends compounds other than 3-HP. In one variation, a substantially pure preparation is provided wherein the preparation contains no more than 25% impurity, or no more than 20% impurity, or no more than 10% impurity, or no more than 5% impurity, or no more than 3% impurity, or no more than 1% impurity, or no more than 0.5% impurity.

[0299] 3-HP produced using the methods disclosed herein can be converted into other organic compounds (e.g., as described in U.S. Pat. No. 8,030,045 and WO 03/082795, the content of which is incorporated herein by reference). For example, 3-HP can be hydrogenated to form 1,3 propanediol, a valuable polyester monomer. Propanediol also can be created from 3-HP using polypeptides having oxidoreductase activity in vitro or in vivo (e.g., using one or more additional enzymatic activities as described supra). Hydrogenating an organic acid such as 3-HP can be performed using any method such as those used to hydrogenate succinic acid and/or lactic acid. For example, 3-HP can be hydrogenated using a metal catalyst. Accordingly, in one aspect is a method of producing 1,3-propanediol comprising: (a) cultivating a recombinant cell described herein (e.g., a recombinant host cell described herein comprising an active 3-HP pathway and a heterologous polynucleotide encoding an aminotransferase), wherein the recombinant cell further comprises oxidoreductase activity in a medium under suitable conditions to produce 1,3-propanediol; and (b) recovering the 1,3-propanediol. In another aspect is a method of producing 1,3-propanediol, comprising: (a) cultivating a recombinant cell described herein (e.g., a recombinant host cell described herein comprising an active 3-HP pathway and a heterologous polynucleotide encoding an aminotransferase) in a medium under suitable conditions to produce 3-HP; (b) recovering the 3-HP; (c) hydrogenating the 3-HP under suitable conditions to produce 1,3-propanediol; and (d) recovering the 1,3-propanediol.

[0300] 3-HP may also be converted to an ester of 3-HP, such as methyl 3-hydroxypropionate, ethyl 3-hydroxypropionate, propyl 3-hydroxypropionate, butyl 3-hydroxypropionate, or 2-ethylhexyl 3-hydroxypropionate. In one aspect is a method of producing a 3-HP ester comprising: (a) cultivating a recombinant cell described herein (e.g., a recombinant host cell described herein comprising an active 3-HP pathway and a heterologous polynucleotide encoding an aminotransferase), wherein the recombinant cell further comprises lipase or esterase activity in a medium under suitable conditions to produce a 3-HP ester; and (b) recovering the 3-HP ester. In another aspect is a method of producing a 3-HP ester, comprising: (a) cultivating a recombinant cell described herein (e.g., a recombinant host cell described herein comprising an active 3-HP pathway and a heterologous polynucleotide encoding an aminotransferase) in a medium under suitable conditions to produce 3-HP; (b) recovering the 3-HP; (c) esterifying the 3-HP under suitable conditions to produce a 3-HP ester; and (d) recovering the 3-HP ester. The recombinant host cells described herein may also be used to produce polymerized 3-HP in vitro or in vivo using techniques known in the art (e.g., Zhou et al Metab. Eng. 2011, 13(6), 777-785; and U.S. Pat. No. 8,030,045; the contents of which are hereby incorporated by reference).

[0301] The 3-HP produced by any of the methods described herein may be converted to acrylic acid. Acrylic acid can be produced by the chemical dehydration of 3-HP using techniques known in the art, e.g., heating in the presence of a catalyst (e.g., a solid oxide dehydration catalyst such as titania or alumina).

[0302] In one aspect is a method of producing acrylic acid or a salt thereof, comprising: (a) cultivating a recombinant cell described herein (e.g., a recombinant host cell described herein comprising an active 3-HP pathway and a heterologous polynucleotide encoding an aminotransferase) in a medium under suitable conditions to produce 3-HP; (b) recovering the 3-HP; (c) dehydrating the 3-HP under suitable conditions to produce acrylic acid or a salt thereof; and (d) recovering the acrylic acid or salt thereof.

[0303] Suitable assays to test for the production of 3-HP, lactate, and derivatives thereof for the methods of production and cells described herein can be performed using methods known in the art. For example, final 3-HP product and intermediates (e.g., pyruvate), as well as other organic compounds, can be analyzed by methods such as HPLC (High Performance Liquid Chromatography), GC-MS (Gas Chromatography Mass Spectroscopy) and LC-MS (Liquid Chromatography-Mass Spectroscopy) or other suitable analytical methods using routine procedures well known in the art. The release of 3-HP in the fermentation broth can also be tested with the culture supernatant. Byproducts and residual sugar in the fermentation medium (e.g., glucose) can be quantified by HPLC using, for example, a refractive index detector for glucose and alcohols, and a UV detector for organic acids (Lin et al., Biotechnol. Bioeng. 90:775-779 (2005)), or using other suitable assay and detection methods well known in the art.

[0304] The invention may be further described by the following numbered paragraphs:

Paragraph [1]. A recombinant yeast cell comprising an active 3-HP pathway capable of producing 3-HP and a heterologous polynucleotide encoding an aminotransferase of E.C. 2.6.1.19, wherein:

[0305] (a) the aminotransferase comprises the motif (A,C)-Xn-(GSLS)-Xn-SKA(L/l)(L/l);

[0306] (b) the aminotransferase has β-alanine aminotransferase (BAAT) activity; and

[0307] (c) the aminotransferase is other than a S. kluyveri, I. orientalis, or S. avermitilis aminotransferase.

Paragraph [2]. The recombinant cell of Paragraph [1], wherein the aminotransferase comprises:

[0308] (i) AC at a positions corresponding to positions 103-104 of SEQ ID NO: 20;

[0309] (ii) GSLS at positions corresponding to positions 194-197 of SEQ ID NO: 20; and

[0310] (iii) SKA(L/l)(L/l) at positions corresponding to positions 354-358 of SEQ ID NO: 20.

Paragraph [3]. A recombinant yeast cell comprising an active 3-HP pathway and a heterologous polynucleotide encoding a β-alanine aminotransferase (BAAT), wherein the BAAT has at least 60% e.g., at least 65%, 70%, 75%, 80%, 85%, 90%, 95%, 97%, 98%, 99%, or 100% sequence identity to SEQ ID NO: 206, SEQ ID NO: 207, SEQ ID NO: 208, SEQ ID NO: 209, SEQ ID NO: 218, SEQ ID NO: 220, SEQ ID NO: 222, SEQ ID NO: 224, SEQ ID NO: 226, SEQ ID NO: 228, SEQ ID NO: 230, SEQ ID NO: 232, or SEQ ID NO: 234; and wherein the cell capable of producing 3-HP.
Paragraph [4]. The recombinant cell of Paragraph [3], wherein the β-alanine aminotransferase (BAAT) has at least 60% e.g., at least 65%, 70%, 75%, 80%, 85%, 90%, 95%, 97%, 98%, 99%, or 100% sequence identity to SEQ ID NO: 206, SEQ ID NO: 207, or SEQ ID NO: 208.
Paragraph [5]. The recombinant cell of Paragraph [3] or [4], wherein the β-alanine aminotransferase (BAAT) comprises the motif (A,C)-Xn-(GSLS)-Xn-SKA(L/l)(L/l).
Paragraph [6]. The recombinant cell of Paragraph [5], wherein the β-alanine aminotransferase (BAAT) comprises:

[0311] (i) AC at a positions corresponding to positions 103-104 of SEQ ID NO: 20;

[0312] (ii) GSLS at positions corresponding to positions 194-197 of SEQ ID NO: 20; and

[0313] (iii) SKA(L/l)(L/l) at positions corresponding to positions 354-358 of SEQ ID NO: 20.

Paragraph [7]. The recombinant cell of any one of Paragraphs [3]-[6], wherein β-alanine aminotransferase (BAAT) differs by no more than ten amino acids, e.g., by no more than five amino acids, by no more than four amino acids, by no more than three amino acids, by no more than two amino acids, or by one amino acid from SEQ ID NO: 206, SEQ ID NO: 207, SEQ ID NO: 208, SEQ ID NO: 209, SEQ ID NO: 218, SEQ ID NO: 220, SEQ ID NO: 222, SEQ ID NO: 224, SEQ ID NO: 226, SEQ ID NO: 228, SEQ ID NO: 230, SEQ ID NO: 232, or SEQ ID NO: 234.
Paragraph [8]. The recombinant cell of any one of Paragraphs [3]-[7], wherein β-alanine aminotransferase (BAAT) differs by no more than ten amino acids, e.g., by no more than five amino acids, by no more than four amino acids, by no more than three amino acids, by no more than two amino acids, or by one amino acid from SEQ ID NO: 206, SEQ ID NO: 207, or SEQ ID NO: 208.
Paragraph [9]. The recombinant cell of any one of Paragraphs [3]-[8], wherein the β-alanine aminotransferase (BAAT) has an amino acid sequence comprising or consisting of SEQ ID NO: 206, SEQ ID NO: 207, SEQ ID NO: 208, SEQ ID NO: 209, SEQ ID NO: 218, SEQ ID NO: 220, SEQ ID NO: 222, SEQ ID NO: 224, SEQ ID NO: 226, SEQ ID NO: 228, SEQ ID NO: 230, SEQ ID NO: 232, or SEQ ID NO: 234.
Paragraph [10]. The recombinant cell of any one of Paragraphs [3]-[9], wherein the β-alanine aminotransferase (BAAT) has an amino acid sequence comprising or consisting of SEQ ID NO: 206, SEQ ID NO: 207, or SEQ ID NO: 208.
Paragraph [11]. The recombinant cell of any one of Paragraphs [3]-[10], wherein the heterologous polynucleotide comprises a coding sequence having at least 60%, e.g., at least 65%, at least 70%, at least 75%, at least 80%, at least 85%, at least 90%, at least 95%, at least 96%, at least 97%, at least 98%, at least 99%, or 100% sequence identity to SEQ ID NO: 239, SEQ ID NO: 240, SEQ ID NO: 241, SEQ ID NO: 242, SEQ ID NO: 243, SEQ ID NO: 244, SEQ ID NO: 245, SEQ ID NO: 246, SEQ ID NO: 247, SEQ ID NO: 248, SEQ ID NO: 249, SEQ ID NO: 250, or SEQ ID NO: 251.
Paragraph [12]. The recombinant cell of any one of Paragraphs [3]-[11], wherein the heterologous polynucleotide comprises a coding sequence having at least 60%, e.g., at least 65%, at least 70%, at least 75%, at least 80%, at least 85%, at least 90%, at least 95%, at least 96%, at least 97%, at least 98%, at least 99%, or 100% sequence identity to SEQ ID NO: 239, SEQ ID NO: 240, or SEQ ID NO: 241.
Paragraph [13]. The recombinant cell of any one of Paragraphs [3]-[12], wherein the heterologous polynucleotide has a coding sequence that comprises or consists of SEQ ID NO: 239, SEQ ID NO: 240, SEQ ID NO: 241, SEQ ID NO: 242, SEQ ID NO: 243, SEQ ID NO: 244, SEQ ID NO: 245, SEQ ID NO: 246, SEQ ID NO: 247, SEQ ID NO: 248, SEQ ID NO: 249, SEQ ID NO: 250, or SEQ ID NO: 251.
Paragraph [14]. The recombinant cell of any one of Paragraphs [3]-[13], wherein the heterologous polynucleotide has a coding sequence that comprises or consists of SEQ ID NO: 239, SEQ ID NO: 240, or SEQ ID NO: 241.
Paragraph [15]. The recombinant cell of any one of Paragraphs [3]-[14], wherein the heterologous polynucleotide comprises a coding sequence that hybridizes under at least low stringency conditions e.g., medium stringency conditions, medium-high stringency conditions, high stringency conditions, or very high stringency conditions with the full-length complementary strand of SEQ ID NO: 239, SEQ ID NO: 240, SEQ ID NO: 241, SEQ ID NO: 242, SEQ ID NO: 243, SEQ ID NO: 244, SEQ ID NO: 245, SEQ ID NO: 246, SEQ ID NO: 247, SEQ ID NO: 248, SEQ ID NO: 249, SEQ ID NO: 250, or SEQ ID NO: 251.
Paragraph [16]. The recombinant cell of any one of Paragraphs [3]-[15], wherein the heterologous polynucleotide comprises a coding sequence that hybridizes under at least low stringency conditions e.g., medium stringency conditions, medium-high stringency conditions, high stringency conditions, or very high stringency conditions with the full-length complementary strand of SEQ ID NO: 239, SEQ ID NO: 240, or SEQ ID NO: 241.
Paragraph [17]. The recombinant cell of any one of Paragraphs [1]-[16], wherein the aminotransferase lacks an N-terminal mitochondrial target sequence (MTS).
Paragraph [18]. The recombinant cell of any one of Paragraphs [1]-[17], wherein the active 3-HP pathway proceeds through a β-alanine and/or malonate semialdehyde intermediate.
Paragraph [19]. The recombinant yeast cell of any one of Paragraphs [1]-[18], wherein the heterologous polynucleotide encoding the β-alanine aminotransferase (BAAT) comprises a promoter foreign to the polynucleotide encoding the β-alanine aminotransferase (BAAT).
Paragraph [20]. The recombinant yeast cell of any of paragraphs [1]-[19], wherein the cell produces a greater amount of 3-HP compared to the cell without the heterologous polynucleotide encoding the β-alanine aminotransferase (BAAT), when cultivated under identical conditions (e.g., at least 10%, at least 15%, at least 20%, at least 25%, at least 30%, at least 35%, at least 40%, at least 45%, at least 50%, at least 75%, at least 100%, at least 150%, at least 200%, at least 250%, at least 300%, or at least 500% more).
Paragraph [21]. The recombinant yeast cell of any one of Paragraphs [1]-[20], wherein the cell produces a greater amount of 3-HP (e.g., at least 10%, at least 15%, at least 20%, at least 25%, at least 30%, at least 35%, at least 40%, at least 45%, at least 50%, at least 75%, at least 100%, at least 200%, at least 300%, or at 500% more) compared to a second recombinant yeast cell, when cultivated under the same conditions; wherein the second cell is identical to the yeast cell with the proviso that the second cell encodes the BAAT of SEQ ID NO: 20 in place of the yeast cell aminotransterase.
Paragraph [22]. The recombinant yeast cell of any of paragraphs [1]-[21], wherein the cell further comprises one or more (e.g., two, several) heterologous polynucleotides selected from: a heterologous polynucleotide encoding a PYC; a heterologous polynucleotide encoding an AAT; a heterologous polynucleotide encoding an ADC; a heterologous polynucleotide encoding a 3-HPDH; and a heterologous polynucleotide encoding a PPC.
Paragraph [23]. The recombinant cell of any one of Paragraphs [1]-[22], wherein the cell is Crabtree-negative or Crabtree-positive.
Paragraph [24]. The recombinant cell of any one of Paragraphs [1]-[23], wherein the cell belongs to a genus selected from Candida, Kluyveromyces, Pichia, Issatchenkia, Schizosaccharomyces, Torulaspora, Zygosaccharomyces, and Saccharomyces.
Paragraph [25]. The recombinant cell of Paragraph [24], wherein the cell belongs to a clade selected from the Saccharomyces clade and the I. orientalis/P. fermentans clade.
Paragraph [26]. The recombinant cell of Paragraph [24], wherein the cell is selected from I. orientalis, C. lambica, and S. bulderi.
Paragraph [27]. The recombinant cell of any one of Paragraphs [1]-[23], wherein the cell is a CNB1 yeast cell.
Paragraph [28]. The recombinant cell of any one of Paragraphs [1]-[26], wherein the yeast cell is unable to ferment pentose sugars.
Paragraph [29]. The recombinant cell of any one of Paragraphs [1]-[28], wherein said cell further comprises a disruption to one or more endogenous dse2, scw11, eaf3, sed1, or sam2 genes, and/or one or more endogenous genes encoding a PDC, ADH, GAL6, CYB2A, CYB2B, GPD, GPP, ALD, or PCK.
Paragraph [30]. The recombinant cell of any one of Paragraphs [1]-[29], wherein said cell further comprises a disruption to an endogenous gene encoding a PDC.
Paragraph [31]. The recombinant cell of any one of Paragraphs [1]-[30], wherein said cell further comprises a disruption to an endogenous gene encoding a GPD.
Paragraph [32]. A composition comprising the recombinant cell of any one of Paragraphs [1]-[31].
Paragraph [33]. The composition of Paragraph [32], wherein the composition comprises a fermentable medium.
Paragraph [34]. The composition of Paragraph [33], wherein the fermentable medium comprises sucrose, glucose, and/or fructose.
Paragraph [35]. The composition of any one of Paragraph [33] or [34], wherein the fermentable medium comprises less than 1% pentose sugars.
Paragraph [36]. The composition of any one of Paragraphs [32]-[35], further comprising 3-HP.
Paragraph [37]. The composition of Paragraph [36], wherein the 3-HP is at a titer greater than about 1 g/L, e.g., greater than about 2 g/L, 5 g/L, 10 g/L, 15 g/L, 20 g/L, 25 g/L, 30 g/L, 35 g/L, 40 g/L, 45 g/L, 50 g/L, 55 g/L, 60 g/L, 65 g/L, 70 g/L, 75 g/L, 80 g/L, 85 g/L, 90 g/L, 95 g/L, 100 g/L, 125 g/L, 150 g/L, 200 g/L, or 250 g/L.
Paragraph [38]. The composition of any one of Paragraphs [32]-[37], wherein the medium is at a pH of less than 6.5, e.g., in the range of about 1.5 to about 4.5, about 2.0 to about 4.0, or about 2.0 to about 3.5.
Paragraph [39]. A method of producing 3-HP, comprising:

[0314] (a) cultivating the recombinant yeast cell of any one of Paragraphs [1]-[31] in a fermentable medium under suitable conditions to produce 3-HP; and

[0315] (b) recovering the 3-HP.

Paragraph [40]. The method of Paragraph [39], wherein the resulting 3-HP is substantially pure.
Paragraph [41]. A method of producing acrylic acid or a salt thereof, comprising:

[0316] (a) cultivating the recombinant cell of any one of Paragraphs [1]-[31] in a fermentable medium under suitable conditions to produce 3-HP;

[0317] (b) recovering the 3-HP;

[0318] (c) dehydrating the 3-HP under suitable conditions to produce acrylic acid or a salt thereof; and

[0319] (d) recovering the acrylic acid or salt thereof.

Paragraph [42]. A method of producing a 3-HP ester, comprising:

[0320] (a) cultivating the recombinant cell of any one of Paragraphs [1]-[31] in a fermentable medium under suitable conditions to produce 3-HP;

[0321] (b) recovering the 3-HP;

[0322] (c) esterifying the 3-HP under suitable conditions to produce a 3-HP ester; and

[0323] (d) recovering the 3-HP ester

Paragraph [43]. A method of producing 1,3-propanediol, comprising:

[0324] (a) cultivating the recombinant cell of any one of Paragraphs [1]-[31] in a fermentable medium under suitable conditions to produce 3-HP;

[0325] (b) recovering the 3-HP;

[0326] (c) hydrogenating the 3-HP under suitable conditions to produce 1,3-propanediol; and

[0327] (d) recovering the 1,3-propanediol.

Paragraph [44]. The method of any one of Paragraph [39]-[43], wherein the fermentable medium comprises sucrose, glucose, and/or fructose.
Paragraph [45]. The method of any one of Paragraph [39]-[44], wherein the fermentable medium comprises less than 1% pentose sugars.
Paragraph [46]. The method of any one of Paragraphs [39]-[45], wherein the fermentable medium is at a pH of less than 6.5, e.g., in the range of about 1.5 to about 4.5, about 2.0 to about 4.0, or about 2.0 to about 3.5.
Paragraph [47]. The method of any one of Paragraphs [39]-[46], wherein the produced 3-HP is at a titer greater than about 1 g/L, e.g., greater than about 2 g/L, 5 g/L, 10 g/L, 15 g/L, 20 g/L, 25 g/L, 30 g/L, 35 g/L, 40 g/L, 45 g/L, 50 g/L, 55 g/L, 60 g/L, 65 g/L, 70 g/L, 75 g/L, 80 g/L, 85 g/L, 90 g/L, 95 g/L, 100 g/L, 125 g/L, 150 g/L, 200 g/L, or 250 g/L.
Paragraph [48]. The method of any one of Paragraphs [39]-[47] wherein the recombinant cell is a CNB1 cell cultivated in a fermentable medium comprising less than 1% pentose sugars.

[0328] The following examples are provided by way of illustration and are not intended to be limiting of the invention.

### EXAMPLES

[0329] Chemicals used as buffers and substrates were commercial products of at least reagent grade.

### Strains

[0330] The strain MeJi412 was constructed from I. orientalis CD1822 as described in WO 2012/074818 (the content of which is incorporated herein by reference) and expresses an ADC gene to provide an active 3-HP pathway that proceeds through a β-alanine intermediate.

[0331] The strain McTs236 was constructed from MeJi412 as described in WO 2012/074818 (the content of which is incorporated herein by reference) and contains a homozygous deletion of the native gene encoding the I. orientalis BAAT (pyd4) of SEQ ID NO: 20.

### Media and Solutions

[0332] 2× YT+amp plates were composed of 16 g/L tryptone, 10 g/L yeast extract, 5 g/L NaCl, 100 mg/L ampicillin, and 15 g/L Bacto agar.

[0333] Yeast SD-ura selection plates were composed of 6.7 g yeast nitrogen base with ammonium sulfate, 1 g yeast synthetic dropout supplement w/o uracil 20 g bacteriological agar, and deionized water to a final volume of 960 mL. Following autoclave sterilization, 40 mL sterile 50% glucose was added and plates poured.

[0334] Yeast SD-ura selection media was composed of 6.7 g yeast nitrogen base with ammonium sulfate, 1 g yeast synthetic dropout supplement w/o uracil 20 g bacteriological agar, and deionized water to a final volume of 960 mL. Following autoclave sterilization, 40 mL sterile 50% glucose was added and plates poured.

[0335] YP+10% glucose media was composed of 500 mL YP broth and 100 mL sterile 50% glucose.

[0336] YP broth was composed of 10 g/L of yeast extract, 20 g/L of peptone.

[0337] TBE was composed of 10.8 g/L of Tris base, 5.5 g/L boric acid, and 4 mL/L of 0.5 M EDTA pH 8.0.

[0338] LiOAc/TE solution was composed of 8 parts sterile water, 1 part 1 M LiOAc, and 1 part 10× TE.

[0339] 10× TE (200 mL) was composed of 2.42 g Tris Base, 4 mL 0.5M EDTA, pH 8.0. 5 M HCl was used to adjust the pH to 7.5 and the solution was sterilized by autoclave.

[0340] PEG/LiOAc/TE Solution was composed of 8 parts 50% PEG3350, 1 part 1 M LiOAc, and 1 part 10× TE.

[0341] 50% PEG3350 was prepared by adding 100 g PEG3350 to 150 mL water and heating and stirring until dissolved. The volume was then brought up to 200 mL with water and the sterilized by autoclave.

[0342] Trace element solution was composed of EDTA (15.0 g/L), zinc sulfate heptahydrate (4.5 g/L), manganese chloride dehydrate (1.0 g/L), Cobalt(II)chloride hexahydrate (0.3 g/L), Copper(II)sulfate pentahydrate (0.3 g/L), disodium molybdenum dehydrate (0.4 g/L), calcium chloride dehydrate (4.5 g/L), iron sulphate heptahydrate (3 g/L), boric acid (1.0 g/L), and potassium iodide (0.1 g/L).

[0343] Vitamin solution was composed of biotin (D-; 14.1 g/L), calcium pantothenate (D+; 1 g/L), nicotinic acid (5 g/L), myo-inositol (25 g/L), pyridoxine hydrochloride (1 g/L), p-aminobenzoic acid (0.2 g/L), and thiamine hydrochloride (1 g/L).

[0344] CNB1 shake flask media was composed of urea (2.3 g/L), magnesium sulfate heptahydrate (0.5 g/L), potassium phosphate monobasic (3.0 g/L), trace element solution (1 mL/L) and vitamin solution (1 mL/L), glucose (120.0 g/L), 2-(N-Morpholino)ethanesulfonic acid (MES) (97.6 g/L). After dissolving all medium components, the pH of the medium was adjusted to an initial pH of 5.8 using an appropriate base (e.g., KOH).

TABLE 1
Primers sequences used in the Examples.

| Identi- | SEQ ID | |
|---|---|---|
| fier | NO: | Sequence (5′-3′) |
| 611245 | 255 | CGAACCAATTCAAGAAAACCAAC |
| 611317 | 256 | GGTCCTTACATCTGTCTAGT |
| 611678 | 257 | TTGTTGCCATCTGCATCCAC |
| 611717 | 258 | CGCTACGATACGCTACGATA |
| 611815 | 259 | CTCCTTCATTTAACTATACCAGACG |
| 612794 | 260 | GAAGGGGGTCCAAGTTATCC |
| 612795 | 261 | CCAACAATCTTAATTGGTGAC |
| 612908 | 262 | GATATGGGCGGTAGAGAAGA |
| 612909 | 263 | GCTCCTTCAAAGGCAACACA |
| 612910 | 264 | TGAACTATCACATGAACGTA |
| 612911 | 265 | TCAAGGTAGGGTCACTTAAC |
| 613242 | 266 | TCCATAATCCAATAGATCATCCC |
| 613243 | 267 | AACACAATGGAACCAACCTAGT |
| 614179 | 268 | CGCATACATTATGGTAGATG |
| 614180 | 269 | GATTGAAGATTCTTACAGGC |
| 614626 | 270 | AGGGTACCTTAGTACGAAGG |
| 614627 | 271 | CTATTCTTACGATGAAGGCG |
| 614851 | 272 | TAGTTAATTAATTACAGAGTTGGTAAGACTT |
| 614852 | 273 | GACTCTAGATAAAATGTCTTACGCTTCAAGATA |
| 614945 | 274 | GTCAGACTTTGCAACCTC |
| 1212900 | 275 | ATGTAAACGTCCAACAACTTG |
| 1212904 | 276 | GTACTTCCCAAGAGAGCCAT |
| 1213764 | 277 | GATGTCGTAGTAGTCGGTAG |
| 1213770 | 278 | CGAAGCAAACAACTTGGTTG |
| 1213862 | 279 | ATGCCAATGCTGGTCTGTTTG |

### Example 1: Procedure for DNA Transformation

[0345] DNA transformation into the host genome to generate the recombinant strains described in the following examples was conducted based on the specific procedure below.

[0346] Three mL of YP+10% glucose media was added to a 14 mL Falcon tube and the desired strain was inoculated into this media using a sterile loop. The culture was grown with shaking at 250 rpm overnight (˜16 hr) at 37° C. 0.5 mL of the overnight culture was added to a 125 mL baffled flask containing 25 mL of liquid YP+10% glucose media. The flask was grown with shaking at 250 rpm at 37° C. Small aliquots of the culture were withdrawn at approximately hourly intervals and the OD₆₀₀ was measured. The culture was grown until the OD₆₀₀ was 0.6-1.0.

[0347] The cells were harvested by centrifugation at 2279×g at room temperature, the pellet was resuspended in 25 mL sterile water, then centrifuged at 2279×g at room temperature. The pellet was resuspended in 1 mL sterile water, and the resuspended cells were transferred to a 1.5 mL tube and then pelleted at 16,100×g. The cells were resuspended in 1 mL LiOAc/TE solution and then pelleted at 16,100×g. The cell pellet was then resuspended in 250 μL LiOAc/TE solution.

[0348] The following components were added to a 1.5 mL tube: 100 μL of the above cells, 10 μL freshly boiled then iced salmon sperm DNA (Agilent Technologies, Santa Clara, Calif., USA), and 10 μL of the desired, linearized transforming DNA. A control reaction with water instead of DNA was also prepared. To each transformation reaction, 600 μL of PEG/LiOAc/TE Solution was added, followed by 40 μL DMSO and the reactions were inverted several times to mix. The transformation reactions were incubated in a 42° C. water bath for 15 minutes, and cells were pelleted at 5,400×g for 1 min. Cells were resuspended in water, split in two, and each half of the transformation reaction was plated to a yeast SD-ura selection plate. Plates were placed at 37° C. Colonies were visible after 2 days of growth.

### Example 2: Identification and Analysis of Aminotransferases

[0349] Sequences from approximately 50 BAAT and gabT aminotransferase homologs were analyzed for regions that may be key for specific activity toward the β-alanine or GABA substrates. Based on alignment (e.g., FIG. 2) three putative conserved regions were identified as important for specificity of β-alanine: AC at positions 103-104, GSLS at positions 194-197, and SKA(L/l)(L/l) at positions 354-358 (corresponding to SEQ ID NO: 20). A representative summary for aminotransferases of numerous species is shown in Table 2.

[0350] For genomes with two aminotransferase homologs, we observed that the homologs with an N-terminal mitochondrial target sequence (MTS) resemble BAAT by containing the three regions of interest. At positions 103-104 the amino acids were AC for the MTS homologs and GN for the non-MTS homologs from those same organisms. At the 194-197 region, the mitochondrial homologs were usually GSLS and the non-MTS homologs were usually ASGS. Lastly, positions 354-358 for the mitochondrial homologs were conserved SKA with either an isoleucine or leucine. In the non-MTS homologs, the sequence was primarily ARMIL. Both S. kluyveri and I. orientalis contained BAAT and gabT homologs (all without MTS).

[0351] For genomes with only one identified aminotransferase homolog, C. arabinofermentans, P. membranifaciens, and B. bruxellensis all show putative non-MTS BAAT homologs.

TABLE 2

| | | | Assingment: BAAT | | | Assingment: gabT | | |
|---|---|---|---|---|---|---|---|---|
| Organism | SEQ ID | MTS | 103-104 | 194-197 | 354-358 | 103-104 | 194-197 | 354-358 |
| S. kluyveri | 21 | no | AC | GSLS | SKALI | | | |
| | 212 | no | | | | GN | ASGS | ARMII |
| I. orientalis | 20 | no | AC | GSLS | SKALI | | | |
| | 211 | no | | | | GN | ASGS | KGVIL |
| S. pombe | 213 | no | | | | GN | GSLS | FRAVQ |
| S. cerevisiae | 24 | no | | | | GN | ASGS | ARMII |
| K. lactis | 214 | no | | | | GN | ASGS | ARMII |
| N. castelli | 216 | no | | | | GN | ASGS | ARILI |
| A. gossypii | 217 | no | | | | GN | ASGS | AHMII |
| C. parapsilosis | 218 | yes | AC | GSLS | SKAIL | | | |
| | 219 | no | | | | GN | ASGS | ARMTL |
| S. stipitis | 220 | yes | AC | GSLS | SKAII | | | |
| | 221 | no | | | | GN | ASGS | ARMIL |
| L. elongisporius | 222 | yes | AC | GALA | SKALI | | | |
| | 223 | no | | | | GN | ASGS | ARMIL |
| C. guilliermondii | 209 | yes | AC | GSLS | SKALI | | | |
| | 210 | no | | | | GN | ASGS | ARMIL |
| C. lusitaniae | 224 | yes | AC | GSLS | SKALI | | | |
| | 225 | no | | | | GN | ASAS | ARMIL |
| C. albicans | 226 | yes | AC | GSLS | SKALI | | | |
| | 227 | no | | | | GN | ASGS | ARMIL |
| D. hansenii | 228 | yes | AC | GSLS | SKALI | | | |
| | 229 | no | | | | GN | ASGS | ARMIL |
| C. tropicalis | 230 | yes | AC | GSLS | SKAIL | | | |
| | 231 | no | | | | GN | ASGS | ARMIL |
| K. capsulata | 232 | yes | AC | GSLS | SKALI | | | |
| | 233 | no | | | | GN | ATAS | TKMII |
| M. farinosa | 234 | yes | AC | GSLS | SKALL | | | |
| | 235 | no | | | | GN | ASGS | ARMIL |
| C. arabinofermentans | 207 | no | AC | GSLS | SKALI | | | |
| P. membranifaciens | 206 | no | AC | GSLS | SKALI | | | |
| A. niger | 236 | yes | | | | GN | GSLS | ARALI |
| B. bruxellensis | 208 | no | AC | GSLS | SKALI | | | |

[0352] The significance of the motif (A,C)-Xn-(GSLS)-Xn-SKA(L/l)(L/l) for BAAT activity can be identified rough molecular modeling, wherein the 103-104 region was determined to be at the entrance of the enzyme active site and the 194-197 region sits near the active site in the PLP binding area (FIG. 3). The 354-358 region appears to be near the surface of the protein (FIG. 4).

### Example 3: Construction of an Insertion Vector for Expressing a Heterologous Candida arabinofermentans Aminotransferase at the Adh9091 Locus (pMcTs343)

[0353] The plasmid pMcTs343 was designed to allow integration of a coding sequence of a Candida arabinofermentans aminotransferase at the adh9091 locus under the control of the PDC promoter and terminator using URA3 as a selectable marker, and was constructed as described below.

[0354] A codon-optimized version of an aminotransferase coding sequence from C. arabinofermentans (SEQ ID NO: 240) and flanked by 5′ XbaI site and 3′ PacI restriction sites, was provided by GeneArt (Life Technologies Corporation) in a DNA String fragment designated 14ACKV6P. This fragment was cloned into pCR-BluntII-TOPO vector (Invitrogen) and transformed into Stellar chemically competent cells (Clontech) according to manufacturer's instructions. After a recovery period, two 100 μl aliquots from the transformation mixture were plated onto 150 mm 2×YT plates supplemented with 50 μg of kanamycin per ml and incubated overnight at 37° C. Recombinant colonies of the transformations were each inoculated into 3 ml of LB medium supplemented with kanamycin (50 μg/ml). Plasmid DNA was prepared from these cultures using a BIOROBOT® Universal System (Qiagen, Inc.) and analyzed by restriction digestion and sequencing. The plasmid DNA from one clone having the correct restriction digest pattern for C. arabinofermentans aminotransferase coding sequence in PCR II-Blunt-TOPO vector was designated pMcTs338.

[0355] Plasmid pMcTs338 was digested with XbaI and PacI and the 1.45 kbp fragment containing the C. arabinofermentans aminotransferase coding sequence was gel isolated and purified NucleoSpin Gel and PCR clean up kit (Macherey-Nagel).

[0356] Plasmid pMBin204 (described in WO2012074818) was digested with XbaI and PacI and the 8.4 kbp fragment was gel isolated and purified using the NucleoSpin Gel and PCR clean up kit (Macherey-Nagel).

[0357] Cloning of the DNA fragment containing the coding sequence of the C. arabinofermentans aminotransferase (supra) into the 8.4 kbp pMBin204 linearized vector (supra) was performed using T4 DNA ligase (New England Biolabs). The reaction mixture contained 1× T4 DNA ligase buffer, 1 μl T4 DNA ligase, 1 μl of the pMBin204 XbaI/PacI digested DNA fragment above, and 5 μl of the pMcTs338 XbaI/PacI digested product above in total volume of 20 μl. The reaction mixture was incubated at room temperature for at least 1 hour and subsequently used to transform Stellar Competent Cells (Clontech) according to manufacturer's instructions. After a recovery period, two 100 μl aliquots from the transformation mixture were plated onto 150 mm 2×YT plates supplemented with 100 μg of ampicillin per ml and incubated overnight at 37° C. Recombinant colonies of the transformations were each inoculated into 3 ml of LB medium supplemented with ampicillin (100 μg/ml). Plasmid DNA was prepared from these cultures using a BIOROBOT® Universal System (QIAGEN Inc.) and subjected to restriction digest checks. The plasmid DNA from one clone having the correct restriction digest pattern was further subjected to sequence analysis and designated pMcTs343 (FIG. 5).

[0358] Plasmid pMcTs343 contains a C. arabinofermentans aminotransferase coding sequence (SEQ ID NO: 240, which encodes for SEQ ID NO: 207) under control of the PDC promoter and terminator, with the URA3 selectable marker flanked by regions of homology to the adh9091 locus. The aminotransferase of SEQ ID NO: 207 is identified (based on the analysis supra) as a β-alanine aminotransferase (BAAT) and comprises the motif (A,C)-Xn-(GSLS)-Xn-SKA(L/l)(L/l), specifically, (i) AC at a positions corresponding to positions 103-104 of SEQ ID NO: 20; (ii) GSLS at positions corresponding to positions 194-197 of SEQ ID NO: 20; and (iii) SKALI at positions corresponding to positions 354-358 of SEQ ID NO: 20 (See, Table 2 and FIG. 2).

### Example 4: Construction of an Insertion Vector for Expressing a Heterologous Brettanomyces bruxellensis Aminotransferase at the Adh9091 Locus (pMcTs351)

[0359] The plasmid pMcTs351 was designed to allow integration of a coding sequence of a Brettanomyces bruxellensis aminotransferase at the adh9091 locus under the control of the PDC promoter and terminator using URA3 as a selectable marker, and was constructed as described below.

[0360] A codon-optimized version of an aminotransferase coding sequence from B. bruxellensis (SEQ ID NO: 241) and flanked by 5′ XbaI site and 3′ PacI restriction sites, was provided by GeneArt (Life Technologies Corporation) in a DNA String fragment designated 14AC24TP.

[0361] Plasmid pMBin204 (described in WO2012074818) was digested with XbaI and PacI and the 8.4 kbp fragment was gel isolated and purified using the NucleoSpin Gel and PCR clean up kit (Macherey-Nagel).

[0362] The DNA fragment 14AC24TP (supra) was cloned into the pMBin204 XbaI/PacI digested DNA fragment using InFusion HD (Clontech) and transformed into Stellar (Clontech) chemically competent cells according to manufacturer's instructions. After a recovery period, two 100 μl aliquots from the transformation mixture were plated onto 150 mm 2×YT plates supplemented with 100 μg of ampicillin per ml and incubated overnight at 37° C. Recombinant colonies of the transformations were each inoculated into 3 ml of LB medium supplemented with ampicillin (100 μg/ml). Plasmid DNA was prepared from these cultures using a BIOROBOT® Universal System (QIAGEN Inc.) and subjected restriction digest checks. The plasmid DNA from one clone having the correct restriction digest pattern was further subjected to sequence analysis and designated pMcTs351 (FIG. 6).

[0363] Plasmid pMcTs351 contains a B. bruxellensis aminotransferase coding sequence (SEQ ID NO: 241, which encodes for SEQ ID NO: 208) under control of the PDC promoter and terminator, with the URA3 selectable marker flanked by regions of homology to the adh9091 locus. The aminotransferase of SEQ ID NO: 208 is identified (based on the analysis supra) as a β-alanine aminotransferase (BAAT) and comprises the motif (A,C)-Xn-(GSLS)-Xn-SKA(L/l)(L/l), specifically, (i) AC at a positions corresponding to positions 103-104 of SEQ ID NO: 20; (ii) GSLS at positions corresponding to positions 194-197 of SEQ ID NO: 20; and (iii) SKALI at positions corresponding to positions 354-358 of SEQ ID NO: 20 (See, Table 2 and FIG. 2).

### Example 5: Construction of an Insertion Vector for Expressing a Heterologous Pichia membranifaciens Aminotransferase at the Adh9091 Locus (pMcTs352)

[0364] The plasmid pMcTs352 was designed to allow integration of a coding sequence of a Pichia membranifaciens aminotransferase at the adh9091 locus under the control of the PDC promoter and terminator using URA3 as a selectable marker, and was constructed as described below.

[0365] A codon-optimized version of an aminotransferase coding sequence from P. membranifaciens (SEQ ID NO: 239) and flanked by 5′ XbaI site and 3′ PacI restriction sites, was provided by GeneArt (Life Technologies Corporation) in a DNA String fragment designated 14ACYSOP.

[0366] Plasmid pMBin204 (described in WO2012074818) was digested with XbaI and PacI and the 8.4 kbp fragment was gel isolated and purified using the NucleoSpin Gel and PCR clean up kit (Macherey-Nagel).

[0367] The DNA fragment 14ACYSOP (supra) was cloned into the pMBin204 XbaI/PacI digested DNA fragment using InFusion HD (Clontech) and transformed into Stellar (Clontech) chemically competent cells according to manufacturer's instructions. After a recovery period, two 100 μl aliquots from the transformation mixture were plated onto 150 mm 2×YT plates supplemented with 100 μg of ampicillin per ml and incubated overnight at 37° C. Recombinant colonies of the transformations were each inoculated into 3 ml of LB medium supplemented with ampicillin (100 μg/ml). Plasmid DNA was prepared from these cultures using a BIOROBOT® Universal System (QIAGEN Inc.) and subjected restriction digest checks. The plasmid DNA from one clone having the correct restriction digest pattern was further subjected to sequence analysis and designated pMcTs352 (FIG. 7).

[0368] Plasmid pMcTs352 contains a P. membranifaciens aminotransferase coding sequence (SEQ ID NO: 239, which encodes for SEQ ID NO: 206) under control of the PDC promoter and terminator, with the URA3 selectable marker flanked by regions of homology to the adh9091 locus. The aminotransferase of SEQ ID NO: 206 is identified (based on the analysis supra) as a β-alanine aminotransferase (BAAT) and comprises the motif (A,C)-Xn-(GSLS)-Xn-SKA(L/l)(L/l), specifically, (i) AC at a positions corresponding to positions 103-104 of SEQ ID NO: 20; (ii) GSLS at positions corresponding to positions 194-197 of SEQ ID NO: 20; and (iii) SKALI at positions corresponding to positions 354-358 of SEQ ID NO: 20 (See, Table 2 and FIG. 2).

### Example 6: Construction of an Insertion Vector for Expressing a Heterologous Candida guilliermondii Aminotransferase at the Adh9091 Locus (pMcTs356)

[0369] The plasmid pMcTs356 was designed to allow integration of a coding sequence of a Candida guilliermondii aminotransferase at the adh9091 locus under the control of the PDC promoter and terminator using URA3 as a selectable marker, and was constructed as described below.

[0370] A codon-optimized version of an aminotransferase coding sequence from C. guilliermondii (SEQ ID NO: 242) and flanked by 5′ XbaI site and 3′ PacI restriction sites, was provided by GeneArt (Life Technologies Corporation) in a DNA String fragment designated 14AHQJPC.

[0371] Plasmid pMBin204 (described in WO2012074818) was digested with XbaI and PacI and the 8.4 kbp fragment was gel isolated and purified using the NucleoSpin Gel and PCR clean up kit (Macherey-Nagel).

[0372] The DNA fragment 14AHQJPC (supra) was cloned into the pMBin204 XbaI/PacI digested DNA fragment using InFusion HD (Clontech) and transformed into Stellar (Clontech) chemically competent cells according to manufacturer's instructions. After a recovery period, two 100 μl aliquots from the transformation mixture were plated onto 150 mm 2×YT plates supplemented with 100 μg of ampicillin per ml and incubated overnight at 37° C. Recombinant colonies of the transformations were each inoculated into 3 ml of LB medium supplemented with ampicillin (100 μg/ml). Plasmid DNA was prepared from these cultures using a BIOROBOT® Universal System (QIAGEN Inc.) and subjected restriction digest checks. The plasmid DNA from one clone having the correct restriction digest pattern was further subjected to sequence analysis and designated pMcTs356 (FIG. 8).

[0373] Plasmid pMcTs356 contains a C. guilliermondii aminotransferase coding sequence (SEQ ID NO: 242, which encodes for SEQ ID NO: 209) under control of the PDC promoter and terminator, with the URA3 selectable marker flanked by regions of homology to the adh9091 locus. The aminotransferase of SEQ ID NO: 209 is identified (based on the analysis supra) as a β-alanine aminotransferase (BAAT) and comprises the motif (A,C)-Xn-(GSLS)-Xn-SKA(L/l)(L/l), specifically, (i) AC at a positions corresponding to positions 103-104 of SEQ ID NO: 20; (ii) GSLS at positions corresponding to positions 194-197 of SEQ ID NO: 20; and (iii) SKALI at positions corresponding to positions 354-358 of SEQ ID NO: 20 (See, Table 2).

### Example 7: Construction of an Insertion Vector for Expressing a Heterologous Candida guilliermondii Aminotransferase at the Adh9091 Locus (pMcTs342)

[0374] The plasmid pMcTs342 was designed to allow integration of a coding sequence of a Candida guilliermondii aminotransferase at the adh9091 locus under the control of the PDC promoter and terminator using URA3 as a selectable marker, and was constructed as described below.

[0375] A codon-optimized version of an aminotransferase coding sequence from C. guilliermondii (SEQ ID NO: 252) and flanked by 5′ XbaI site and 3′ PacI restriction sites, was provided by GeneArt (Life Technologies Corporation) in a DNA String fragment designated 14ACKV7P. This fragment was cloned into pCR-BluntII-TOPO vector (Invitrogen) and transformed into Stellar chemically competent cells (Clontech) according to manufacturer's instructions. After a recovery period, two 100 μl aliquots from the transformation mixture were plated onto 150 mm 2×YT plates supplemented with 50 μg of kanamycin per ml and incubated overnight at 37° C. Recombinant colonies of the transformations were each inoculated into 3 ml of LB medium supplemented with kanamycin (50 μg/ml). Plasmid DNA was prepared from these cultures using a BIOROBOT® Universal System (Qiagen, Inc.) and analyzed by restriction digestion and sequencing. The plasmid DNA from one clone having the correct restriction digest pattern for C. guilliermondii aminotransferase coding sequence in PCR II-Blunt-TOPO vector was designated pMcTs337.

[0376] Plasmid pMcTs338 was digested with XbaI and PacI and the 1.4 kbp fragment containing the C. guilliermondii aminotransferase coding sequence was gel isolated and purified NucleoSpin Gel and PCR clean up kit (Macherey-Nagel).

[0377] Plasmid pMBin204 (described in WO2012074818) was digested with XbaI and PacI and the 8.4 kbp fragment was gel isolated and purified using the NucleoSpin Gel and PCR clean up kit (Macherey-Nagel).

[0378] Cloning of the DNA fragment containing the coding sequence of the C. guilliermondii aminotransferase (supra) into the 8.4 kbp pMBin204 linearized vector (supra) was performed using T4 DNA ligase (New England Biolabs). The reaction mixture contained 1× T4 DNA ligase buffer, 1 μl T4 DNA ligase, 1 μl of the pMBin204 XbaI/PacI digested DNA fragment above, and 5 μl of the pMcTs337 XbaI/PacI digested product above in total volume of 20 μl. The reaction mixture was incubated at room temperature for at least 1 hour and subsequently used to transform Stellar Competent Cells (Clontech) according to manufacturer's instructions. After a recovery period, two 100 μl aliquots from the transformation mixture were plated onto 150 mm 2×YT plates supplemented with 100 μg of ampicillin per ml and incubated overnight at 37° C. Recombinant colonies of the transformations were each inoculated into 3 ml of LB medium supplemented with ampicillin (100 μg/ml). Plasmid DNA was prepared from these cultures using a BIOROBOT® Universal System (QIAGEN Inc.) and subjected to restriction digest checks. The plasmid DNA from one clone having the correct restriction digest pattern was further subjected to sequence analysis and designated pMcTs342 (FIG. 9).

[0379] Plasmid pMcTs342 contains a C. guilliermondii aminotransferase coding sequence (SEQ ID NO: 252, which encodes for SEQ ID NO: 210) under control of the PDC promoter and terminator, with the URA3 selectable marker flanked by regions of homology to the adh9091 locus. The aminotransferase of SEQ ID NO: 210 is identified (based on the analysis supra) as a 4-aminobutyrate aminotransferase (gabT) as it lacks the motif (A,C)-Xn-(GSLS)-Xn-SKA(L/l)(L/l), specifically, it contains (i) GN at a positions corresponding to positions 103-104 of SEQ ID NO: 20; (ii) ASGS at positions corresponding to positions 194-197 of SEQ ID NO: 20; and (iii) ARMIL at positions corresponding to positions 354-358 of SEQ ID NO: 20 (See, Table 2).

### Example 8: Construction of an Insertion Vector for Expressing a Heterologous I. orientalis Aminotransferase at the Adh9091 Locus (pMBin211)

[0380] The plasmid pMBin211 was designed to allow integration of a coding sequence of a I. orientalis aminotransferase at the adh9091 locus under the control of the PDC promoter and terminator using URA3 as a selectable marker, and was constructed as described below.

[0381] The I. orientalis aminotransferase coding sequence (SEQ ID NO: 253) was amplified from MBin500 I. orientalis genomic DNA (WO2012074818) using primers 614851 and 614852. During application, the primer 614852 adds a kozak sequence (TAAA) and XbaI restriction site to the 5′ end of the sequence, and primer 614851 adds a Pad restriction site to the 3′ end of the sequence. Fifty pmoles of each primer was used in a PCR reaction containing 50 ng of MBin500 genomic DNA as template, 0.25 mM each dATP, dGTP, dCTP, dTTP, 1× Failsafe Buffer A (Epicentre), and 1.25 units FailSafe PCR Enzyme Mix (Epicentre) in a final volume of 50 μL. The PCR was performed in an EPPENDORF® MASTERCYCLER® (Eppendorf Scientific) programmed for one cycle at 95° C. for 1.5 minutes followed by 35 cycles each at 95° C. for 30 seconds, 55° C. for 30 seconds, and 72° C. for 1.5 minutes with a final extension at 72° C. for 5 minutes. Following thermocycling, the PCR reaction products were cleaned up QIAQUICK® PCR clean up Kit (Qiagen) then digested with XbaI and Pad restriction enzymes. The digests were separated by 1.0% agarose gel electrophoresis in TBE buffer where an approximately 1.4 kbp PCR product was excised from the gel and purified using a using a QIAQUICK® Gel Extraction Kit (Qiagen) according to the manufacturer's instructions.

[0382] Plasmid pMBin204 (described in WO2012074818) was digested with XbaI and Pad and the 8.4 kbp fragment was gel isolated and purified using the NucleoSpin Gel and PCR clean up kit (Macherey-Nagel).

[0383] Cloning of the DNA fragment containing the coding sequence of the I. orientalis aminotransferase (supra) into the 8.4 kbp pMBin204 linearized vector (supra) was performed using T4 DNA ligase (New England Biolabs). The reaction mixture contained 1 ul pMBin204 XbaI/PacI DNA fragment, 4 ul of the 1.4 kbp XbaI/PacI PCR product (supra), 1 ul T4 DNA ligase Buffer (New England Biolabs), and 1 ul T4 DNA ligase (New England Biolabs) in a final volume of 10 μl. The reaction was incubated at room temperature overnight then 4 μl was used to transform One Shot TOP10 cells (Invitrogen) according to manufacturer's instructions. The transformations were plated onto 2×YT+kan plates (50 μg/ml) and incubated at 37° C. overnight. Several of the resulting transformants were screened by digestion. Clones yielding the desired insert size were confirmed to be correct by DNA sequencing. One clone containing the correct was designated pMBin211 (FIG. 10).

[0384] Plasmid pMBin211 contains an I. orientalis aminotransferase coding sequence (SEQ ID NO: 253, which encodes for SEQ ID NO: 211) under control of the PDC promoter and terminator, with the URA3 selectable marker flanked by regions of homology to the adh9091 locus. The aminotransferase of SEQ ID NO: 211 is identified (based on the analysis supra) as a 4-aminobutyrate aminotransferase (gabT) as it lacks the motif (A,C)-Xn-(GSLS)-Xn-SKA(L/l)(L/l), specifically, it contains (i) GN at a positions corresponding to positions 103-104 of SEQ ID NO: 20; (ii) ASGSV at positions corresponding to positions 194-197 of SEQ ID NO: 20; and (iii) KGVIL at positions corresponding to positions 354-358 of SEQ ID NO: 20 (See, Table 2 and FIG. 2).

### Example 9: Construction of an Insertion Vector for Expressing a Heterologous Saccharomyces kluyveri Aminotransferase at the Adh9091 Locus (pMBin218)

[0385] The plasmid pMBin218 was designed to allow integration of a coding sequence of a Saccharomyces kluyveri aminotransferase at the adh9091 locus under the control of the PDC promoter and terminator using URA3 as a selectable marker, and was constructed as described below.

[0386] A codon-optimized version of an aminotransferase coding sequence from Saccharomyces kluyveri (SEQ ID NO: 254) and flanked by 5′ XbaI site and 3′ PacI restriction sites, was provided by GeneArt (Life Technologies Corporation) in a plasmid designated 1045171. The plasmid 1045171 was digested with XbaI and PacI and the 1.4 kbp fragment was gel isolated and purified using the QIAQUICK® Gel Extraction Kit (Qiagen) according to the manufacturer's instructions.

[0387] Plasmid pMBin204 (described in WO2012074818) was digested with XbaI and PacI and the 8.4 kbp fragment was gel isolated and purified using the NucleoSpin Gel and PCR clean up kit (Macherey-Nagel).

[0388] Cloning of the DNA fragment containing the coding sequence of the Saccharomyces kluyveri aminotransferase (supra) into the 8.4 kbp pMBin204 linearized vector (supra) was performed using T4 DNA ligase (New England Biolabs). The reaction mixture contained 1× T4 DNA ligase buffer, 1 μl T4 DNA ligase, 1 μl of the pMBin204 XbaI/PacI digested DNA fragment above, and 7 μl of the 1045171 XbaI/PacI digested product above in total volume of 10 μl. The reaction mixture was incubated at room temperature for at least 1 hour and subsequently used to transform One Shot TOP10 cells (Invitrogen) according to manufacturer's instructions. After a recovery period, two 100 μl aliquots from the transformation mixture were plated onto 150 mm 2×YT plates supplemented with 50 μg of kanamycin per ml and incubated overnight at 37° C. Recombinant colonies of the transformations were each inoculated into 3 ml of LB medium supplemented with kanamycin (50 μg/ml). Plasmid DNA was prepared from these cultures using a BIOROBOT® Universal System (QIAGEN Inc.) and subjected to restriction digest checks. The plasmid DNA from one clone having the correct restriction digest pattern for Saccharomyces kluyveri aminotransferase coding sequence to the I. orientalis adh9091 locus was further subjected to sequence analysis and designated pMBin218 (FIG. 11).

[0389] Plasmid pMBin218 contains a Saccharomyces kluyveri aminotransferase coding sequence (SEQ ID NO: 254, which encodes for SEQ ID NO: 21) under control of the PDC promoter and terminator, with the URA3 selectable marker flanked by regions of homology to the adh9091 locus. The aminotransferase of SEQ ID NO: 21 is identified (based on the analysis supra) as a β-alanine aminotransferase (BAAT) and comprises the motif (A,C)-Xn-(GSLS)-Xn-SKA(L/l)(L/l), specifically, (i) AC at a positions corresponding to positions 103-104 of SEQ ID NO: 20; (ii) GSLS at positions corresponding to positions 194-197 of SEQ ID NO: 20; and (iii) SKALI at positions corresponding to positions 354-358 of SEQ ID NO: 20 (See, Table 2 and FIG. 2).

### Example 10: Construction of a Recombinant Strain Expressing a Heterologous Candida arabinofermentans Aminotransferase at the Adh9091 Locus

[0390] Strains McTs707 and McTs708 express the heterologous Candida arabinofermentans aminotransferase of SEQ ID NO: 207 at the adh9091 locus, and were constructed as described below.

[0391] Approximately 20 μg of pMcTs343 (Example 3) was digested with ApaI, SacI and EheI and separated on a 0.7% agarose gel using 89 mM Tris base-89 mM Boric Acid-2 mM disodium EDTA (TBE) buffer. The desired approximately 6.0 kbp fragment was excised from the gel and purified using NucleoSpin Gel and PCR clean up kit (Macherey-Nagel) according to the manufacturer's instructions. The linear construct was transformed into yeast strain McTs245 (WO2012074818) as described above.

[0392] Several single isolates from each transformation were screened for the site of integration as well as confirming that the other loci were still modified. The integration at adh9091 was confirmed by PCR using LongAmp Taq (New England Biolabs) according to the manufacturer's instructions using primers 614627+612909 and 612908+614626. The PCR product from 612908+614626 yielded an approximately 2.0 kbp band and the product from 614627+612909 yielded an approximately 3.9 kbp band. The adh1202 locus and pyd4 locus were also analyzed to confirm they were still modified using primer sets 611245+612794 (to yield an approximately 3.0 kb band) and 611815+612795 (to yield an approximately 3.6 kb band) for adh1202 locus, and 613242+613243 (to yield an approximately 2.1 kb band) if pyd4 locus deleted. For the integration cassette, two transformants with the correct size bands for the PCRs were designed McTs707 and McTs708.

### Example 11: Construction of a Recombinant Strain Expressing a Heterologous Brettanomyces bruxellensis Aminotransferase or a Heterologous Pichia membranifaciens Aminotransferase at the Adh9091 Locus

[0393] Strains McTs761 and McTs762 express the heterologous Brettanomyces bruxellensis aminotransferase of SEQ ID NO: 208 at the adh9091 locus. Strains McTs764 and McTs765 express the heterologous Pichia membranifaciens aminotransferase of SEQ ID NO: 206 at the adh9091 locus. These strains were constructed as described below.

[0394] Approximately 40 μg each of pMcTs351 and pMcTs352 (Examples 4 and 5, respectively) was digested with ApaI, SacI and EheI and separated on a 0.7% agarose gel using 89 mM Tris base-89 mM Boric Acid-2 mM disodium EDTA (TBE) buffer. The desired approximately 6.0 kbp fragment was excised from the gel and purified using NucleoSpin Gel and PCR clean up kit (Macherey-Nagel) according to the manufacturer's instructions. The linear constructs were transformed into yeast strain McTs245 (WO2012074818) as described above.

[0395] Several single isolates from each transformation were screened for the site of integration as well as confirming that the other loci were still modified. The integration at adh9091 was confirmed by PCR using LongAmp Taq (New England Biolabs) according to the manufacturer's instructions using primers 614627+612909 and 612908+614626. The PCR product from 612908+614626 yielded an approximately 2.0 kbp band and the product from 614627+612909 yielded an approximately 3.9 kbp band. The adh1202 locus and pyd4 locus were also analyzed to confirm they were still modified using primer sets 611245+612794 (to yield an approximately 3.0 kb band) and 611815+612795 (to yield an approximately 3.6 kb band) for adh1202 locus, and 613242+613243 (to yield an approximately 2.1 kb band) if pyd4 locus deleted. Additionally a primer set specific to either the B. bruxellensis or P. membranifaciens gene were used to confirm the correct integrants. Primer set 614627+1213862 (to yield an approximately 2.0 kb band) confirmed the B. bruxellensis gene at adh9091 and primer set 614627+1213764 (to yield an approximately 2.0 kb band) confirmed the P. membranifaciens gene at adh9091. For each integration cassette, two transformants were selected with the correct size bands by PCR and were designated McTs761 and McTs762 (B. bruxellensis) and McTs764 and McTs765 (P. membranifaciens).

### Example 12: Construction of a Recombinant Strain Expressing a Heterologous Candida guilliermondii Aminotransferase at the Adh9091 Locus

[0396] Strains McTs801 and McTs802 express the heterologous Candida guilliermondii aminotransferase of SEQ ID NO: 209 at the adh9091 locus, and were constructed as described below.

[0397] Approximately 40 μg of pMcTs356 (Example 6) was digested with ApaI, SacI and EheI and separated on a 0.7% agarose gel using 89 mM Tris base-89 mM Boric Acid-2 mM disodium EDTA (TBE) buffer. The desired approximately 6.0 kbp fragment was excised from the gel and purified using NucleoSpin Gel and PCR clean up kit (Macherey-Nagel) according to the manufacturer's instructions. The linear construct was transformed into yeast strain McTs245 (WO2012074818) as described above.

[0398] Several single isolates from each transformation were screened for the site of integration as well as confirming that the other loci were still modified. The integration at adh9091 was confirmed by PCR using LongAmp Taq (New England Biolabs) according to the manufacturer's instructions using primers 614627+1212900 and 1213770+614626. The PCR product from 614627+1212900 was 1.9 kb and 1213770+614626 was 3.5 kb for correct integrants. The adh1202 locus and pyd4 locus were also analyzed to confirm they were still modified using primer sets 611245+612794 (to yield an approximately 3 kb band) and 611815+612795 (to yield an approximately 3.6 kb band) for adh1202 locus and 613242+613243 (to yield an approximately 2.1 kb band) if pyd4 locus deleted. For the integration cassette, two transformants with the correct size bands for the PCRs was designed McTs801 and McTs802.

### Example 13: Construction of a Recombinant Strain Expressing a Heterologous Candida guilliermondii Aminotransferase at the Adh9091 Locus

[0399] Strains McTs697 and McTs698 express the heterologous Candida guilliermondii aminotransferase of SEQ ID NO: 210 at the adh9091 locus, and were constructed as described below.

[0400] Approximately 20 μg of pMcTs342 (Example 7) was digested with ApaI, SacI and EheI and separated on a 0.7% agarose gel using 89 mM Tris base-89 mM Boric Acid-2 mM disodium EDTA (TBE) buffer. The desired approximately 6.0 kbp fragment was excised from the gel and purified using NucleoSpin Gel and PCR clean up kit (Macherey-Nagel) according to the manufacturer's instructions. The linear construct was transformed into yeast strain McTs245 (WO2012074818) as described above.

[0401] Several single isolates from each transformation were screened for the site of integration as well as confirming that the other loci were still modified. The integration at adh9091 was confirmed by LongAmp Taq (New England Biolabs) according to the manufacturer's instructions with primers 614627+612909 and 612908+614626. The PCR product from 612908+614626 was 2.0 kb and 614627+612909 was 3.9 kb for correct integrants. The adh1202 locus and pyd4 locus were also analyzed to confirm they were still modified using primer sets 611245+612794 (to yield an approximately 3 kb band) and 611815+612795 (to yield an approximately 3.6 kb band) for adh1202 locus and 613242+613243 (to yield an approximately 2.1 kb band) if pyd4 locus deleted. Additionally PCR primer set 1212904+614626 (to yield an approximately 4.5 kb band) confirmed the C. guilliermondii aminotransferase coding sequence at adh9091. For the integration cassette, two transformants with the correct size bands for the PCRs was designed McTs697 and McTs698.

### Example 14: Construction of a Recombinant Strain Expressing a Heterologous i. Orientalis Aminotransferase at the Adh9091 Locus

[0402] Strain MBin533 expresses the heterologous I. orientalis aminotransferase of SEQ ID NO: 20 at the adh9091 locus, and was constructed as described below. The aminotransferase of SEQ ID NO: 20 is identified (based on the analysis supra) as a β-alanine aminotransferase (BAAT) and comprises the motif (A,C)-Xn-(GSLS)-Xn-SKA(L/l)(L/l), specifically, (i) AC at a positions corresponding to positions 103-104 of SEQ ID NO: 20; (ii) GSLS at positions corresponding to positions 194-197 of SEQ ID NO: 20; and (iii) SKALI at positions corresponding to positions 354-358 of SEQ ID NO: 20 (See, Table 2 and FIG. 2).

[0403] Approximately 7 μg of pMBin204 (described in WO2012074818) was digested with ApaI, SacI and EheI and separated on a 1.0% agarose gel using 89 mM Tris base-89 mM Boric Acid-2 mM disodium EDTA (TBE) buffer. The desired approximately 6.0 kbp fragment was excised from the gel and purified using NucleoSpin Gel and PCR clean up kit (Macherey-Nagel) according to the manufacturer's instructions. The linear construct was transformed into yeast strain McTs245 (WO2012074818) as described above.

[0404] Several single isolates from each transformation were screened for the site of integration as well as confirming that the other loci were still modified. The integration at adh9091 was confirmed by Phire Plant PCR kit (Thermo) according to the manufacturer's instructions with primers 614180+611678 and 614179+611317. The PCR product from 614180+611678 was 1.1 kb and 614179+611317 was 2.3 kb for correct integrants. The adh1202 locus and pyd4 locus were also analyzed to confirm they were still modified using primer sets 611245+612794 (to yield an approximately 3 kb band) and 611815+612795 (to yield an approximately 3.6 kb band) for adh1202 locus and 612910+612911 (to yield an approximately 1.1 kb band) if pyd4 locus deleted. For the integration cassette, one transformant with the correct size bands for the PCRs was designed MBin533.

### Example 15: Construction of a Recombinant Strain Expressing a Heterologous i. Orientalis Aminotransferase at the Adh9091 Locus

[0405] Strain MBin539 expresses the heterologous I. orientalis aminotransferase of SEQ ID NO: 211 at the adh9091 locus, and were constructed as described below.

[0406] Approximately 7 μg of pMBin211 (Example 8) was digested with ApaI, SacI and EheI and separated on a 0.7% agarose gel using 89 mM Tris base-89 mM Boric Acid-2 mM disodium EDTA (TBE) buffer. The desired approximately 6.0 kbp fragment was excised from the gel and purified using NucleoSpin Gel and PCR clean up kit (Macherey-Nagel) according to the manufacturer's instructions. The linear construct was transformed into yeast strain McTs245 (WO2012074818) as described above.

[0407] Several single isolates from each transformation were screened for the site of integration as well as confirming that the other loci were still modified. The integration at adh9091 was confirmed by Phire Plant PCR kit (Thermo) according to the manufacturer's instructions with primers 614180+614945 and 614179+611317. The PCR product from 614180+611678 was 1.9 kb and 614179+611317 was 2.5 kb for correct integrants. The adh1202 locus and pyd4 locus were also analyzed to confirm they were still modified using primer sets 611245+612794 (to yield an approximately 3 kb band) and 611815+612795 (to yield an approximately 3.6 kb band) for adh1202 locus. For the integration cassette, one transformant with the correct size bands for the PCRs was designed MBin539.

### Example 16: Construction of a Recombinant Strain Expressing a Heterologous Saccharomyces kluyveri Aminotransferase at the Adh9091 Locus

[0408] Strain MBin548 expresses the heterologous Saccharomyces kluyveri aminotransferase of SEQ ID NO: 21 at the adh9091 locus, and were constructed as described below.

[0409] Approximately 7 μg of pMBin218 (Example 9) was digested with ApaI, SacI and EheI and separated on a 0.7% agarose gel using 89 mM Tris base-89 mM Boric Acid-2 mM disodium EDTA (TBE) buffer. The desired approximately 6.0 kbp fragment was excised from the gel and purified using NucleoSpin Gel and PCR clean up kit (Macherey-Nagel) according to the manufacturer's instructions. The linear construct was transformed into yeast strain McTs245 (WO2012074818) as described above.

[0410] Several single isolates from each transformation were screened for the site of integration as well as confirming that the other loci were still modified. The integration at adh9091 was confirmed by Phire Plant PCR kit (Thermo) according to the manufacturer's instructions with primers 614180+611717 and 614179+611317. The PCR product from 614180+611717 was 1.1 kb and 614179+611317 was 2.5 kb for correct integrants. The adh1202 locus and pyd4 locus were also analyzed to confirm they were still modified using primer sets 611245+612794 (to yield an approximately 3 kb band) and 611815+612795 (to yield an approximately 3.6 kb band) for adh1202 locus and 613243+612911 (to yield an approximately 1.6 kb band) if pyd4 locus deleted. For the integration cassette, one transformant with the correct size bands for the PCRs was designed MBin548.

TABLE 3

| | | | (A,C)-Xn-(GSLS)-Xn- |
|---|---|---|---|
| | | Encoded | SKA(L/I)(L/I) |
| Plasmid | Strain | aminotransferase | Motif |
| pMBin204 | MBin533 | I. orientalis | Yes |
| | | (SEQ ID NO: 20) | |
| pMBin218 | MBin548 | S. kluyveri | Yes |
| | | (SEQ ID NO: 21) | |
| pMBin211 | MBin539 | I. orientalis | No |
| | | (SEQ ID NO: 211) | |
| pMcTs343 | McTs707 | C. arabinofermentans | Yes |
| | McTs708 | (SEQ ID NO: 207) | |
| pMcTs351 | McTs761M | B. bruxellensis | Yes |
| | cTs762 | (SEQ ID NO: 208) | |
| pMcTs352 | McTs764 | P. membranifaciens | Yes |
| | McTs765 | (SEQ ID NO: 206) | |
| pMcTs342 | McTs697M | C. guilliermondii | No |
| | cTs698 | (SEQ ID NO: 210) | |
| pMcTs356 | McTs801 | C. guilliermondii | Yes |
| | McTs802 | (SEQ ID NO: 209) | |

### Example 17: Enzymatic Activity of Recombinant Strains Expressing a Heterologous Aminotransferase

[0411] Strains MeJi412 and McTs236 (See, WO2012074818), MBin533, MBin539, McTs708, McTs764, McTs697, and McTs801 were grown in shake flasks according to the following procedure. The strains were streaked out for single colonies on yeast SD-ura is selection plates and incubated at 30° C. for 1-2 days. Seed cultures were prepared in 250 ml baffled flasks containing 50 mL CNB1 shake flask media inoculated with 1-2 colonies from the yeast SD-ura selection plate. The seed cultures were grown for approximately 18 hours at 30° C. with shaking at 200 rpm. Small aliquots of the culture were then withdrawn to measure the OD600 until reaching an OD600 of 4-6. The seed flask cultivation was used to inoculate 125 ml baffled flasks containing 50 mL CNB1 shake flask media to an OD600=0.2. Cultures were incubated at 30° C. with shaking at 140 rpm for 20 hr. An aliquot of the sample was used to measure the optical density (OD) of the culture.

[0412] The cells were collected by centrifugation and the supernatant was discarded. For preparation of CFE, the cell pellets were washed with phosphate-buffered saline (PBS) and again collected by centrifugation. The supernatant was discarded and the cell pellet was resuspended to an OD600 of 25 based on the culture OD600 at the time of harvest with a lysis buffer consisting of 1×PBS with an additional 10 mM of pH 7.0 potassium phosphate buffer and Protease Inhibitor Cocktail (Roche 04693159001). 1.8 mL of cell suspension was added to 2.0 mL microcentrifuge tubes pre-filled with approximately 300 μL of 0.5 mm zirconia beads (MP Biomedicals). The cell lysis was performed on a FastPrep®-24 disruptor (MP Biomedicals) for 3 rounds at 6.5 m/s for 50 seconds. Sample tubes were cooled on ice for 3 minutes between each round. After lysis, the samples were centrifuged at 15k RPM in a microcentrifuge for 10 minutes at 4° C. The supernatants were transferred to fresh 1.5 mL tubes in 250 μL aliquots and kept on ice prior to assays or frozen at −20° C. for storage. Total protein concentrations of the lysates were determined via an in-house robotics based BCA assay.

[0413] β-Alanine (BAAT) activity and 4-aminobutyrate aminotransferase (gabT) activity in CFE was determined as follows. 190 μL of a reaction mixture containing 100 mM ammonium acetate buffer (pH 6.0 or 7.6), 8 mM α-ketoglutarate, 0.15 mM pyridoxal-5′-phosphate, and 200 mM β-alanine or GABA was added to a 96 well microtiter plate at 25° C. The reaction was initiated by adding 10 μL of CFE. Samples of 20 μL each were taken at 2, 4, 6, 8, 10, and 15 minutes and added to 180 μL of quenching solution (3.0% formic acid). Standards of 0, 0.5, 1.25, 2.5, 5, 10, 20, 40, 80 and 160 g/L glutamate were prepared in 100 mM ammonium acetate (pH 6.0 or 7.6) and 20 μL of these were added to additional wells containing 180 μL of the same quenching solution. Samples were filtered and glutamate quantified via the following LC-MS protocol.

[0414] 2 μL of sample was injected into an Agilent 1200 series HPLC connected to an Agilent 6410 series Triple Quad LC/MS as detector using an Atlantis columns HILIC Silica 3 μm 2.1×150 mm column (Part no: 186002015). A flow rate of 0.3 ml/min was used with an isocratic gradient of 20% solvent A (95% acetonitrile) and 80% solvent B (0.2% formic acid) with an oven temperature of 50° C. The sample buffer was 20% MeOH+0.1% formic acid+0.2 mg/L C13 labeled glutamic acid (DL-Glutamic acid:H2O (2, 4, 4-d3, 97-98%) Cambridge Isotope, DLM-335-1) Samples were analyzed by Agilent Masshunter Quantitative Analysis software using external standards fit to a linear regression. Deuterium labeled glutamic acid was used as an internal standard for glutamic acid. Results were manually inspected and standards were run in the beginning and the end of the batch with the requirement to be within 5% RSD. Additional mass spectra information and parameters are below:

TABLE 4
Mass spectra acquisition

| | Pre- | Pro- | | | Col- | |
|---|---|---|---|---|---|---|
| | cursor | duct | | | lision | |
| Compound | ion | ion | Dwell | Fragmentor | energy | Polarity |
| Glutamic | 148 | 130 | 50 | 75 | 4 | Positive |
| acid | | | | | | |
| Glutamic | 148 | 102 | 50 | 75 | 7 | Positive |
| acid | | | | | | |
| D₃ Glutamic | 151 | 133 | 50 | 75 | 4 | Positive |
| acid | | | | | | |
| D₃ Glutamic | 151 | 105 | 50 | 75 | 7 | Positive |
| acid | | | | | | |

### QQQ Mass Spectrometer Parameters

[0415] Ion source: ESI+(positive ion mode); Stop Mode: no limit/as pump; Stop time: 3.0; Time filter: on; Time filter peak width: 0.1; Delta EMV: 450; Gases: N2; m/z Scan Ranges: 15-1650; Scan mode: Multiple Reaction Monitoring (MRM)

### Ion Source Parameters

[0416] Gas temp (° C.): 300; Gas flow (I/min): 10; Nebulizer (psi): 32; Capillary (V): 4000

[0417] As shown in Table 5, deletion of the native pyd4 gene results elimination of detectable beta-alanine aminotransferase activity (McTs236 vs. MeJi412). Beta-alanine aminotransferase enzyme activity was restored for strains expressing the heterologous aminotransferases from I. orientalis, C. arabinofermentans, or P. membranifaciens which contain the (A,C)-Xn-(GSLS)-Xn-SKA(L/l)(L/l) motif but not for strains expressing the heterologous aminotransferases I. orientalis and C. guilliermondii aminotransferases which lack the (A,C)-Xn-(GSLS)-Xn-SKA(L/l)(L/l) motif. 4-aminobutyrate aminotransferase enzyme activity was detected for strains expressing the heterologous aminotransferases from I. orientalis or C. guilliermondii which lacks the (A,C)-Xn-(GSLS)-Xn-SKA(L/l)(L/l) motif but not for strains expressing the heterologous aminotransferases from I. orientalis, C. arabinofermentans, or P. membranifaciens which contain the (A,C)-Xn-(GSLS)-Xn-SKA(L/l)(L/l) motif.

TABLE 5

| | | (A,C)-Xn-(GSLS)-Xn- | BAAT Acivity | gabT activity |
|---|---|---|---|---|
| | Encoded | SKA(L/I)(L/I) | (μmol/min/g | (μmol/min/g |
| Strain | aminotransferase | Motif | protein) | protein) |
| MeJi412 | Native pyd4 | Yes | 25.01 | 0.41 |
| McTs236 | Pyd4 deletion | N/A | −1.37 | −2.07 |
| MBin533 | I. orientalis | Yes | 24.86 | 0.19 |
| | (SEQ ID NO: 20) | | | |
| MBin539 | I. orientalis | No | −3.93 | 13.38 |
| | (SEQ ID NO: 211) | | | |
| McTs708 | C. arabinofermentans | Yes | 31.28 | 2.38 |
| | (SEQ ID NO: 207) | | | |
| McTs764 | P. membranifaciens | Yes | 41.95 | 6.06 |
| | (SEQ ID NO: 206) | | | |
| McTs697 | C. guilliermondii | No | −4.62 | 49.00 |
| | (SEQ ID NO: 210) | | | |
| McTs801 | C. guilliermondii | Yes | 13.38 | −3.70 |
| | (SEQ ID NO: 209) | | | |

### Example 18: 3-HP Production of Recombinant Strains Expressing a Heterologous Aminotransferase Comprising the (A,C)-Xn-(GSLS)-Xn-SKA(L/l)(L/l) Motif

[0418] Strains MeJi412 and McTs236 (See, WO2012074818), McTs326 (described in WO2012074818), MBin533, MBin548, McTs708, McTs761, McTs764 were grown in shake flasks according the procedure described in Example 18, where the supernatant following centrifugation were the used for 3-HP analysis as described in WO2012074818.

[0419] As shown in Table 6, deletion of the native pyd4 gene results in lowered detectable BAAT Activity (McTs236 vs. MeJi412) which was restored (and enhanced) by heterologous expression of an aminotransferase from S. kluyveri, C. arabinofermentans, I. orientalis, B. bruxellensis, or P. membranifaciens containing the (A,C)-Xn-(GSLS)-Xn-SKA(L/l)(L/l) motif. Likewise, deletion of the native pyd4 gene in the control strain MeJi412 (containing active 3-HP pathway) results in lowered detectable 3-HP (McTs236 vs. MeJi412) and 3-HP production was restored (and enhanced) by expressing an aminotransferase from S. kluyveri, C. arabinofermentans, I. orientalis, B. bruxellensis, or P. membranifaciens containing the (A,C)-Xn-(GSLS)-Xn-SKA(L/l)(L/l) motif.

TABLE 6

| | | (A,C)-Xn-(GSLS)- | BAAT Acivity | 3HP production |
|---|---|---|---|---|
| | Encoded | Xn-SKA(L/I)(L/I) | (μmol/min/g | (g/L)/OD600 +/− |
| Strain | aminotransferase | Motif | protein) | Standard deviation |
| MeJi412 | native | Yes | 87.73 | 0.136 +/− 0.0016 |
| McTs236 | PYD4 deletion | N/A | 17.14 | 0.021 +/− 0.0017 |
| MBin533 | I. orientalis | Yes | 119.60 | 0.219 +/− 0.0114 |
| | (SEQ ID NO: 20) | | | |
| MBin548 | S. kluyveri | Yes | 223.61 | 0.211 +/− 0.0153 |
| | (SEQ ID NO: 21) | | | |
| McTs708 | C. arabinofermentans | Yes | 188.07 | 0.178 +/− 0.0153 |
| | (SEQ ID NO: 207) | | | |
| McTs761 | B. bruxellensis | Yes | 122.39 | 0.176 +/− 0.0129 |
| | (SEQ ID NO: 208) | | | |
| McTs764 | P. membranifaciens | Yes | 183.19 | 0.230 +/− 0.0132 |
| | (SEQ ID NO: 206) | | | |

The application's sequence listing, which the Patent Office published only in electronic form, follows.

SEQUENCE LISTING (279 sequences)

SEQ ID NO: 1 - DNA, 3543 bp, Issatchenkia orientalis
atgtcaactgtggaagatcactcctccctacataaattgagaaaggaatctgagattctttccaatgcaaacaaaatcttagtggctaatagaggtgaaattccaattagaattttcaggtcagcccatgaattgtcaatgcatactgtggcgatctattcccatgaagatcggttgtccatgcataggttgaaggccgacgaggcttatgcaatcggtaagactggtcaatattcgccagttcaagcttatctacaaattgacgaaattatcaaaatagcaaaggaacatgatgtttccatgatccatccaggttatggtttcttatctgaaaactccgaattcgcaaagaaggttgaagaatccggtatgatttgggttgggcctcctgctgaagttattgattctgttggtgacaaggtttctgcaagaaatttggcaattaaatgtgacgttcctgttgttcctggtaccgatggtccaattgaagacattgaacaggctaaacagtttgtggaacaatatggttatcctgtcattataaaggctgcatttggtggtggtggtagaggtatgagagttgttagagaaggtgatgatatagttgatgctttccaaagagcgtcatctgaagcaaagtctgcctttggtaatggtacttgttttattgaaagatttttggataagccaaaacatattgaggttcaattattggctgataattatggtaacacaatccatctctttgaaagagattgttctgttcaaagaagacatcaaaaggttgttgaaattgcacctgccaaaactttacctgttgaagttagaaatgctatattaaaggatgctgtaacgttagctaaaaccgctaactatagaaatgctggtactgcagaatttttagttgattcccaaaacagacattattttattgaaattaatccaagaattcaagttgaacatacaattactgaagaaatcacgggtgttgatattgttgccgctcaaattcaaattgctgcaggtgcatcattggaacaattgggtctattacaaaacaaaattacaactagaggttttgcaattcaatgtagaattacaaccgaggatcctgctaagaattttgccccagatacaggtaaaattgaggtttatagatctgcaggtggtaacggtgtcagattagatggtggtaatgggtttgccggtgctgttatatctcctcattatgactcgatgttggttaaatgttcaacatctggttctaactatgaaattgccagaagaaagatgattagagctttagttgaatttagaatcagaggtgtcaagaccaatattcctttcttattggcattgctaactcatccagttttcatttcgggtgattgttggacaacttttattgatgataccccttcgttattcgaaatggtttcttcaaagaatagagcccaaaaattattggcatatattggtgacttgtgtgtcaatggttcttcaattaaaggtcaaattggtttccctaaattgaacaaggaagcagaaatcccagatttgttggatccaaatgatgaggttattgatgtttctaaaccttctaccaatggtctaagaccgtatctattaaagtatggaccagatgcgttttccaaaaaagttcgtgaattcgatggttgtatgattatggataccacctggagagatgcacatcaatcattattggctacaagagttagaactattgatttactgagaattgctccaacgactagtcatgccttacaaaatgcatttgcattagaatgttggggtggcgcaacatttgatgttgcgatgaggttcctctatgaagatccttgggagagattaagacaacttagaaaggcagttccaaatattcctttccaaatgttattgagaggtgctaatggtgttgcttattcgtcattacctgataatgcaattgatcattttgttaagcaagcaaaggataatggtgttgatattttcagagtctttgatgctttgaacgatttggaacaattgaaggttggtgttgatgctgtcaagaaagccggaggtgttgttgaagctacagtttgttactcaggtgatatgttaattccaggtaaaaagtataacttggattattatttagagactgttggaaagattgtggaaatgggtacccatattttaggtattaaggatatggctggcacgttaaagccaaaggctgctaagttgttgattggctcgatcagatcaaaataccctgacttggttatccatgtccatacccatgactctgctggtaccggtatttcaacttatgttgcatgcgcattggcaggtgccgacattgtcgattgtgcaatcaattcgatgtctggtttaacctctcaaccttcaatgagtgcttttattgctgctttagatggtgatatcgaaactggtgttccagaacattttgcaagacaattagatgcatactgggcagaaatgagattgttatactcatgtttcgaagccgacttgaagggaccagacccagaagtttataaacatgaaattccaggtggacagttgactaacctaatcttccaagcccaacaagttggtttgggtgaacaatgggaagaaactaagaagaagtatgaagatgctaacatgttgttgggtgatattgtcaaggttaccccaacctccaaggttgttggtgatttagcccaatttatggtttctaataaattagaaaaagaagatgttgaaaaacttgctaatgaattagatttcccagattcagttcttgatttctttgaaggattaatgggtacaccatatggtggattcccagagcctttgagaacaaatgtcatttccggcaagagaagaaaattaaagggtagaccaggtttagaattagaacctttcaacctcgaggaaatcagagaaaatttggtttccagatttggtccaggtattactgaatgtgatgttgcatcttataacatgtatccaaaggtttacgagcaatatcgtaaggtggttgaaaaatatggtgatttatctgttttaccaacaaaagcatttttggctcctccaactattggtgaagaagttcatgtggaaattgagcaaggtaagactttgattattaagttattagccatttctgacttgtctaaatctcatggtacaagagaagtatactttgaattgaatggtgaaatgagaaaggttacaattgaagataaaacagctgcaattgagactgttacaagagcaaaggctgacggacacaatccaaatgaagttggtgcgccaatggctggtgtcgttgttgaagttagagtgaagcatggaacagaagttaagaagggtgatccattagccgttttgagtgcaatgaaaatggaaatggttatttctgctcctgttagtggtagggtcggtgaagtttttgtcaacgaaggcgattccgttgatatgggtgatttgcttgtgaaaattgccaaagatgaagcgccagcagcttaa

SEQ ID NO: 2 - protein, 1180 aa, Issatchenkia orientalis
MSTVEDHSSLHKLRKESEILSNANKILVANRGEIPIRIFRSAHELSMHTVAIYSHEDRLSMHRLKADEAYAIGKTGQYSPVQAYLQIDEIIKIAKEHDVSMIHPGYGFLSENSEFAKKVEESGMIWVGPPAEVIDSVGDKVSARNLAIKCDVPVVPGTDGPIEDIEQAKQFVEQYGYPVIIKAAFGGGGRGMRVVREGDDIVDAFQRASSEAKSAFGNGTCFIERFLDKPKHIEVQLLADNYGNTIHLFERDCSVQRRHQKVVEIAPAKTLPVEVRNAILKDAVTLAKTANYRNAGTAEFLVDSQNRHYFIEINPRIQVEHTITEEITGVDIVAAQIQIAAGASLEQLGLLQNKITTRGFAIQCRITTEDPAKNFAPDTGKIEVYRSAGGNGVRLDGGNGFAGAVISPHYDSMLVKCSTSGSNYEIARRKMIRALVEFRIRGVKTNIPFLLALLTHPVFISGDCWTTFIDDTPSLFEMVSSKNRAQKLLAYIGDLCVNGSSIKGQIGFPKLNKEAEIPDLLDPNDEVIDVSKPSTNGLRPYLLKYGPDAFSKKVREFDGCMIMDTTWRDAHQSLLATRVRTIDLLRIAPTTSHALQNAFALECWGGATFDVAMRFLYEDPWERLRQLRKAVPNIPFQMLLRGANGVAYSSLPDNAIDHFVKQAKDNGVDIFRVFDALNDLEQLKVGVDAVKKAGGVVEATVCYSGDMLIPGKKYNLDYYLETVGKIVEMGTHILGIKDMAGTLKPKAAKLLIGSIRSKYPDLVIHVHTHDSAGTGISTYVACALAGADIVDCAINSMSGLTSQPSMSAFIAALDGDIETGVPEHFARQLDAYWAEMRLLYSCFEADLKGPDPEVYKHEIPGGQLTNLIFQAQQVGLGEQWEETKKKYEDANMLLGDIVKVTPTSKVVGDLAQFMVSNKLEKEDVEKLANELDFPDSVLDFFEGLMGTPYGGFPEPLRTNVISGKRRKLKGRPGLELEPFNLEEIRENLVSRFGPGITECDVASYNMYPKVYEQYRKVVEKYGDLSVLPTKAFLAPPTIGEEVHVEIEQGKTLIIKLLAISDLSKSHGTREVYFELNGEMRKVTIEDKTAAIETVTRAKADGHNPNEVGAPMAGVVVEVRVKHGTEVKKGDPLAVLSAMKMEMVISAPVSGRVGEVFVNEGDSVDMGDLLVKIAKDEAPAA

SEQ ID NO: 3 - protein, 1154 aa, Rhodobacter sphaeroides
MAEFRKILIANRGEIAIRVMRAANEMGKKTVAVYAEEDKLSLHRFKADEAYRIGEGLSPVGAYLSIPEIIRVAQMSGADAIHPGYGLLSENPDFVEACDAAGIAFIGPKAETMRALGDKASARRVAMAAGVPVIPATEVLGDDMEEIKRQAAEIGYPLMLKASWGGGGRGMRPITSEAELADKVREGRREAEAAFGNGEGYLEKMIQRARHVEVQILGDKYGAIYHLYERDCTVQRRNQKVVERAPAPYLTEEQRTEICELGRRICAHVNYECAGTVEFLMDMDSEKFYFIEVNPRVQVEHTVTEEVTGIDIVQSQIRIAEGATLAEATGCPSQDDIKLSGHALQCRVTTEDPQNNFIPDYGRLTAYRSATGMGIRLDGGTAYAGGVITRYYDSLLVKVTAWAPTPEKAIARMDRALREFRIRGVATNIAFVENLLKHPSFLDYSYTTKFIDTTPDLFNFKPRRDRATKILTYIADITVNGHPETAGRVRPSAELKDPKAPEPKGAPQPGTRTLLEEKGPQAVADWMAAQTRVLMTDTTMRDGHQSLLATRMRSIDMIKVTPAYAANLGGLFSVECWGGATFDVAYRFLQECPWQRLRDIRARLPNVMTQMLLRASNGVGYTNYPDNVVQEFVRQAAETGVDVFRVFDSLNWVENMRVAMDAVIEANKVCEGTICYTGDLLDPDRSKYDLNYYVGMGRALRDAGAHVLGLKDMAGLLKPAAARVLVKALKEEVGLPIHFHTHDTSGIAGATVLAACDAGVDAVDAAMDAFSGGTSQPCLGSIVEALKHTDRDTGLDIAAIREISDYWGHVRQQYSAFESGLPSPASEVYLHEMPGGQFTNLKAQARSMGLEERWSEVAQAYADANRMFGDIVKVTPSSKVVGDMALMMVAQGLTREEVEDPEVEVSFPDSVVDMLKGNLGQPHGGWPEPILKKVLKGEAPSTERPGAHLPPVDIAAAREKLLSEIKQGDDDPLDTAVDAEDLNGYLMYPKVFTDYRARHRIYGPVRTLPTRTFFYGMEPGEEISAEIDPGKTLEIRLSAVGETSDDGDAKVFFELNGQPRVIRVANRAVKAKTATRPKAQDGNPAHVGAPMPGSVASVAVSAGQKVKPGDLLVTIEAMKMETGLHADRAATVKAVHVGPGAQIEAKDLLVELED

SEQ ID NO: 4 - protein, 1154 aa, Rhizobium etli
MPISKILVANRSEIAIRVFRAANELGIKTVAIWAEEDKLALHRFKADESYQVGRGPHLARDLGPIESYLSIDEVIRVAKLSGADAIHPGYGLLSESPEFVDACNKAGIIFIGPKADTMRQLGNKVAARNLAISVGVPVVPATEPLPDDMAEVAKMAAAIGYPVMLKASWGGGGRGMRVIRSEADLAKEVTEAKREAMAAFGKDEVYLEKLVERARHVESQILGDTHGNVVHLFERDCSVQRRNQKVVERAPAPYLSEAQRQELAAYSLKIAGATNYIGAGTVEYLMDADTGKFYFIEVNPRIQVEHTVTEVVTGIDIVKAQIHILDGAAIGTPQSGVPNQEDIRLNGHALQCRVTTEDPEHNFIPDYGRITAYRSASGFGIRLDGGTSYSGAIITRYYDPLLVKVTAWAPNPLEAISRMDRALREFRIRGVATNLTFLEAIIGHPKFRDNSYTTRFIDTTPELFQQVKRQDRATKLLTYLADVTVNGHPEAKDRPKPLENAARPVVPYANGNGVKDGTKQLLDTLGPKKFGEWMRNEKRVLLTDTTMRDGHQSLLATRMRTYDIARIAGTYSHALPNLLSLECWGGATFDVSMRFLTEDPWERLALIREGAPNLLLQMLLRGANGVGYTNYPDNVVKYFVRQAAKGGIDLFRVFDCLNWVENMRVSMDAIAEENKLCEAAICYTGDILNSARPKYDLKYYTNLAVELEKAGAHIIAVKDMAGLLKPAAAKVLFKALREATGLPIHFHTHDTSGIAAATVLAAVEAGVDAVDAAMDALSGNTSQPCLGSIVEALSGSERDPGLDPAWIRRISFYWEAVRNQYAAFESDLKGPASEVYLHEMPGGQFTNLKEQARSLGLETRWHQVAQAYADANQMFGDIVKVTPSSKVVGDMALMMVSQDLTVADVVSPDREVSFPESVVSMLKGDLGQPPSGWPEALQKKALKGEKPYTVRPGSLLKEADLDAERKVIEKKLEREVSDFEFASYLMYPKVFTDFALASDTYGPVSVLPTPAYFYGLADGEELFADIEKGKTLVIVNQAVSATDSQGMVTVFFELNGQPRRIKVPDRAHGATGAAVRRKAEPGNAAHVGAPMPGVISRVFVSSGQAVNAGDVLVSIEAMKMETAIHAEKDGTIAEVLVKAGDQIDAKDLLAVYGG

SEQ ID NO: 5 - protein, 602 aa, Pseudomonas fluorescens
MTKKIFVTDTILRDAHQSLLATRMRTEDMLPICDKLDKVGYWSLECWGGATFDACVRFLKEDPWERLRQLRAALPNTRLQMLLRGQNLLGYRHYSDDVVKAFVAKAAVNGIDVFRIFDAMNDVRNLRVAIEAVKAAGKHAQGTIAYTTSPVHTIDAFVAQAKQMEAMGCDSVAIKDMAGLLTPYATGELVRALKAEQSLPVFIHSHDTAGLAAMCQLKAIENGADHIDTAISSFASGTSHPGTESMVAALKGTEFDTGLNLELLQEIGLYFYAVRKKYHQFESEFTAVDTRVQVNQVPGGMISNLANQLKEQGALNRMGEVLAEIPRVREDLGFPPLVTPTSQIVGTQAFFNVLAGERYKTITNEVKLYLQGGYGKAPGTVNEKLRRQAIGSEEVIDVRPADLLKPEMTKLRADIGALAKSEEDVLTFAMFPDIGRKFLEERAAGTLTPEVLLPIPEAGKVASAGGEGVPTEFVIDVHGETYRVDITGVGVKAEGKRHFYLSIDGMPEEVVFEPLNEFVGGGSSKRKQASAPGHVSTTMPGNIVDVLVKEGDTVKAGQAVLITEAMKMETEVQAAIAGKVTAIHVAKGDRVNPGEILIEIEG

SEQ ID NO: 6 - protein, 481 aa, Pseudomonas fluorescens
MVPPAQGNLQVITKILIANRGEIAVRIVRACAEMGIRSVAIYSDADRHALHVKRADEAHSIGAEPLAGYLNPRKLVNLAVETGCDALHPGYGFLSENAELADICAERGIKFIGPSAEVIRRMGDKTEARRSMIKAGVPVTPGTEGNVSGIEEALSEGDRIGYPVMLKATSGGGGRGIRRCNSREELEQNFPRVISEATKAFGSAEVFLEKCIVNPKHIEAQILGDSFGNVVHLFERDCSIQRRNQKLIEIAPSPQLTPEQRAYIGDLSVRAAKAVGYENAGTVEFLLAEGEVYFMEMNTRVQVEHTITEEITGIDIVREQIRIASGLPLSVKQEDIQHRGFALQFRINAEDPKNNFLPSFGKITRYYAPGGPGVRTDTAIYTGYTIPPFYDSMCLKLVVWALTWEEAMDRGLRALDDMRLQGVKTTAAYYQEILRNPEFRSGQFNTSFVESHPELTNYSIKRKPEELALAIAAAIAAHAGL

SEQ ID NO: 7 - protein, 1140 aa, Corynebacterium glutamicum
MSTHTSSTLPAFKKILVANRGEIAVRAFRAALETGAATVAIYPREDRGSFHRSFASEAVRIGTEGSPVKAYLDIDEIIGAAKKVKADAIYPGYGFLSENAQLARECAENGITFIGPTPEVLDLTGDKSRAVTAAKKAGLPVLAESTPSKNIDEIVKSAEGQTYPIFVKAVAGGGGRGMRFVASPDELRKLATEASREAEAAFGDGAVYVERAVINPQHIEVQILGDHTGEVVHLYERDCSLQRRHQKVVEIAPAQHLDPELRDRICADAVKFCRSIGYQGAGTVEFLVDEKGNHVFIEMNPRIQVEHTVTEEVTEVDLVKAQMRLAAGATLKELGLTQDKIKTHGAALQCRITTEDPNNGFRPDTGTITAYRSPGGAGVRLDGAAQLGGEITAHFDSMLVKMTCRGSDFETAVARAQRALAEFTVSGVATNIGFLRALLREEDFTSKRIATGFIADHPHLLQAPPADDEQGRILDYLADVTVNKPHGVRPKDVAAPIDKLPNIKDLPLPRGSRDRLKQLGPAAFARDLREQDALAVTDTTFRDAHQSLLATRVRSFALKPAAEAVAKLTPELLSVEAWGGATYDVAMRFLFEDPWDRLDELREAMPNVNIQMLLRGRNTVGYTPYPDSVCRAFVKEAASSGVDIFRIFDALNDVSQMRPAIDAVLETNTAVAEVAMAYSGDLSDPNEKLYTLDYYLKMAEEIVKSGAHILAIKDMAGLLRPAAVTKLVTALRREFDLPVHVHTHDTAGGQLATYFAAAQAGADAVDGASAPLSGTTSQPSLSAIVAAFAHTRRDTGLSLEAVSDLEPYWEAVRGLYLPFESGTPGPTGRVYRHEIPGGQLSNLRAQATALGLADRFELIEDNYAAVNEMLGRPTKVTPSSKVVGDLALHLVGAGVDPADFAADPQKYDIPDSVIAFLRGELGNPPGGWPEPLRTRALEGRSEGKAPLTEVPEEEQAHLDADDSKERRNSLNRLLFPKPTEEFLEHRRRFGNTSALDDREFFYGLVEGRETLIRLPDVRTPLLVRLDAISEPDDKGMRNVVANVNGQIRPMRVRDRSVESVTATAEKADSSNKGHVAAPFAGVVTVTVAEGDEVKAGDAVAIIEAMKMEATITASVDGKIDRVVVPAATKVEGGDLIVVVS

SEQ ID NO: 8 - protein, 1152 aa, Sinorhizobium meliloti
MSISKILVANRSEIAIRVFRAANELGLKTVAIWAEEDKLALHRFKADESYQVGRGPHLPRDLGPIMSYLSIDEVIRVAKLSGADAIHPGYGLLSESPEFAEACAANGITFIGPKPETMRQLGNKVAARNLAISIGVPVVPATEPLPDDPEEIKRLAEEIGYPVMLKASWGGGGRGMRAIRDPKDLIREVTEAKREAKAAFGKDEVYLEKLVERARHVESQILGDTHGNVVHLFERDCSIQRRNQKVVERAPAPYLNDAQRQELADYSLKIARATNYIGAGTVEYLMDSDTGKFYFIEVNPRIQVEHTVTEVVTGIDIVKAQIHILDGFAIGAPESGVPRQEDIRLNGHALQCRITTEDPEQNFIPDYGRITAYRGATGFGIRLDGGTAYSGAVITRYYDPLLEKVTAWAPNPGEAIQRMIRALREFRIRGVATNLTFLEAIISHPKFHDNSYTTRFIDTTPELFQQVKRQDRATKLLTYLADVTVNGHPEVKGRPKPSDDIAAPVVPFTGGDVKPGTKQRLDQLGPKKFAEWVKAQPEVLITDTTMRDGHQSLLATRMRTYDIARIAGTYARALPNLFSLECWGGATFDVSMRFLTEDPWERLAMVREGAPNLLLQMLLRGANGVGYKNYPDNVVKYFVRQAAKGGIDVFRVFDCLNWVENMRVAMDAVAEEDRICEAAICYTGDILNSARPKYDLKYYTALAAELEKAGAHMIAVKDMAGLLKPAAARVLFKALKEATGLPIHFHTHDTSGIAAATVLAAVESGVDVVDAAMDALSGNTSQPCLGSIVEALSGSERDPGLDPEWIRRISFYWEAVRHQYAAFESDLKGPASEVYLHEMPGGQFTNLKEQARSLGLETRWHEVAQAYADANRMFGDIVKVTPSSKVVGDMALMMVSQDLTVADVENPGKDIAFPESVVSMLKGDLGQPPGGWPEALQKKALKGEEPYDARPGSLLEDADLDAERKGIEEKLGREVTDFEFASYLMYPKVFTDYAVACETYGPVSVLPTPAYFYGMAPGEELFADIEKGKTLVILNQAQGEIDEKGMVKMFFEMNGQPRSIKVPDRNRGASAAVRRKAEAGNAAHLGAPMPGVISTVAVASGQSVKAGDVLLSIEAMKMETALHAEKDGVISEVLVRAGDQIDAKDLLVVFGG

SEQ ID NO: 9 - DNA, 2652 bp, Escherichia coli
atgaacgaacaatattccgcattgcgtagtaatgtcagtatgctcggcaaagtgctgggagaaaccatcaaggatgcgttgggagaacacattcttgaacgcgtagaaactatccgtaagttgtcgaaatcttcacgcgctggcaatgatgctaaccgccaggagttgctcaccaccttacaaaatttgtcgaacgacgagctgctgcccgttgcgcgtgcgtttagtcagttcctgaacctggccaacaccgccgagcaataccacagcatttcgccgaaaggcgaagctgccagcaacccggaagtgatcgcccgcaccctgcgtaaactgaaaaaccagccggaactgagcgaagacaccatcaaaaaagcagtggaatcgctgtcgctggaactggtcctcacggctcacccaaccgaaattacccgtcgtacactgatccacaaaatggtggaagtgaacgcctgtttaaaacagctcgataacaaagatatcgctgactacgaacacaaccagctgatgcgtcgcctgcgccagttgatcgcccagtcatggcataccgatgaaatccgtaagctgcgtccaagcccggtagatgaagccaaatggggctttgccgtagtggaaaacagcctgtggcaaggcgtaccaaattacctgcgcgaactgaacgaacaactggaagagaacctcggctacaaactgcccgtcgaatttgttccggtccgttttacttcgtggatgggcggcgaccgcgacggcaacccgaacgtcactgccgatatcacccgccacgtcctgctactcagccgctggaaagccaccgatttgttcctgaaagatattcaggtgctggtttctgaactgtcgatggttgaagcgacccctgaactgctggcgctggttggcgaagaaggtgccgcagaaccgtatcgctatctgatgaaaaacctgcgttctcgcctgatggcgacacaggcatggctggaagcgcgcctgaaaggcgaagaactgccaaaaccagaaggcctgctgacacaaaacgaagaactgtgggaaccgctctacgcttgctaccagtcacttcaggcgtgtggcatgggtattatcgccaacggcgatctgctcgacaccctgcgccgcgtgaaatgtttcggcgtaccgctggtccgtattgatatccgtcaggagagcacgcgtcataccgaagcgctgggcgagctgacccgctacctcggtatcggcgactacgaaagctggtcagaggccgacaaacaggcgttcctgatccgcgaactgaactccaaacgtccgcttctgccgcgcaactggcaaccaagcgccgaaacgcgcgaagtgctcgatacctgccaggtgattgccgaagcaccgcaaggctccattgccgcctacgtgatctcgatggcgaaaacgccgtccgacgtactggctgtccacctgctgctgaaagaagcgggtatcgggtttgcgatgccggttgctccgctgtttgaaaccctcgatgatctgaacaacgccaacgatgtcatgacccagctgctcaatattgactggtatcgtggcctgattcagggcaaacagatggtgatgattggctattccgactcagcaaaagatgcgggagtgatggcagcttcctgggcgcaatatcaggcacaggatgcattaatcaaaacctgcgaaaaagcgggtattgagctgacgttgttccacggtcgcggcggttccattggtcgcggcggcgcacctgctcatgcggcgctgctgtcacaaccgccaggaagcctgaaaggcggcctgcgcgtaaccgaacagggcgagatgatccgctttaaatatggtctgccagaaatcaccgtcagcagcctgtcgctttataccggggcgattctggaagccaacctgctgccaccgccggagccgaaagagagctggcgtcgcattatggatgaactgtcagtcatctcctgcgatgtctaccgcggctacgtacgtgaaaacaaagattttgtgccttacttccgctccgctacgccggaacaagaactgggcaaactgccgttgggttcacgtccggcgaaacgtcgcccaaccggcggcgtcgagtcactacgcgccattccgtggatcttcgcctggacgcaaaaccgtctgatgctccccgcctggctgggtgcaggtacggcgctgcaaaaagtggtcgaagacggcaaacagagcgagctggaggctatgtgccgcgattggccattcttctcgacgcgtctcggcatgctggagatggtcttcgccaaagcagacctgtggctggcggaatactatgaccaacgcctggtagacaaagcactgtggccgttaggtaaagagttacgcaacctgcaagaagaagacatcaaagtggtgctggcgattgccaacgattcccatctgatggccgatctgccgtggattgcagagtctattcagctacggaatatttacaccgacccgctgaacgtattgcaggccgagttgctgcaccgctcccgccaggcagaaaaagaaggccaggaaccggatcctcgcgtcgaacaagcgttaatggtcactattgccgggattgcggcaggtatgcgtaataccggctaa

SEQ ID NO: 10 - protein, 883 aa, Escherichia coli
MNEQYSALRSNVSMLGKVLGETIKDALGEHILERVETIRKLSKSSRAGNDANRQELLTTLQNLSNDELLPVARAFSQFLNLANTAEQYHSISPKGEAASNPEVIARTLRKLKNQPELSEDTIKKAVESLSLELVLTAHPTEITRRTLIHKMVEVNACLKQLDNKDIADYEHNQLMRRLRQLIAQSWHTDEIRKLRPSPVDEAKWGFAVVENSLWQGVPNYLRELNEQLEENLGYKLPVEFVPVRFTSWMGGDRDGNPNVTADITRHVLLLSRWKATDLFLKDIQVLVSELSMVEATPELLALVGEEGAAEPYRYLMKNLRSRLMATQAWLEARLKGEELPKPEGLLTQNEELWEPLYACYQSLQACGMGIIANGDLLDTLRRVKCFGVPLVRIDIRQESTRHTEALGELTRYLGIGDYESWSEADKQAFLIRELNSKRPLLPRNWQPSAETREVLDTCQVIAEAPQGSIAAYVISMAKTPSDVLAVHLLLKEAGIGFAMPVAPLFETLDDLNNANDVMTQLLNIDWYRGLIQGKQMVMIGYSDSAKDAGVMAASWAQYQAQDALIKTCEKAGIELTLFHGRGGSIGRGGAPAHAALLSQPPGSLKGGLRVTEQGEMIRFKYGLPEITVSSLSLYTGAILEANLLPPPEPKESWRRIMDELSVISCDVYRGYVRENKDFVPYFRSATPEQELGKLPLGSRPAKRRPTGGVESLRAIPWIFAWTQNRLMLPAWLGAGTALQKVVEDGKQSELEAMCRDWPFFSTRLGMLEMVFAKADLWLAEYYDQRLVDKALWPLGKELRNLQEEDIKVVLAIANDSHLMADLPWIAESIQLRNIYTDPLNVLQAELLHRSRQAEKEGQEPDPRVEQALMVTIAGIAAGMRNTG

SEQ ID NO: 11 - protein, 483 aa, Methanobacterium thermoautotrophicum
MKVPRCMSTQHPDNVNPPFFAEEPELGGEDEIREAYYVFSHLGCDEQMWDCEGKEVDNYVVKKLLTKYQAFFRDHVLGEDLRLTLRVPNPTVERAEAKILLETLESIPRSYDTASLFYGMDAAPVFEVILPMTSSSSCLNRIHSYYLDFVKGKERLQLADGVTVKEWIGEFRPDEINVIPLFEDHEGMLNAAKITGEYLDGKDIQEQRVFLARSDPAMNYGMISATLLNRIALSDFRDLEEESGVKLYPIIGMGSAPFRGNLRPDNVEDVTWEYRGAYTFTVQSSFKYDHEPSDVIRGIKKLRSVKPGRAAEIERESVLEIISAYCREYRRQVMDLVDIINRVARYVPGRRKRKLHIGLFGYSRSMGNVSLPRAITFTAALYSLGVPPELLGFNALSSGDLEFIEEVYPGLGRDLHDAARYANPESPFLSPEVKSSFEEYLEPEYDEGHMKTTEEIIRALRINRTANLQELILEAASQRKFLG

SEQ ID NO: 12 - protein, 537 aa, Clostridium perfringens
MKIPCSMMTQHPDNVETYISIQQEPAEAIKGLTPQDKGGLGIEEVMIDFEGKLTPYHQTSQIALGLISNGIIPGKDVRVTPRIPNANKESVFRQLMSIMSIIETNVQSKELTGTPAISEVVVPMIETGKEISEFQDRVNSVVDMGNKNYKTKLDLNSVRIIPLVEDVPALANIDRILDEHYEIEKSKGHILKDLRIMIARSDTAMSYGLISGVLSVLMAVDGAYKWGEKHGVTISPILGCGSLPFRGHFSEENIDEILATYSGIKTFTFQSALRYDHGEEATKHAVRELKEKIAQSKPRNFSEEDKDLMKEFIGICSKHYLQTFLKVIDTVSFVSDFIPKNRDRLTKAKTGLEYNREVANLDNVADLVKDEVLKQEILSIDNSKEYAVPRAISFTGAMYTLGMPPELMGMGRALNEIKTKYGQEGIDKLLEIYPILRKDLAFAARFANGGVSKKIIDEEARQEYKEDMKYVNEILNLGLDYDFLNENEFYHTLLKTTKPIIMHLMGLEENVMRNSTEELKILNEWIVRMGKVRGSIG

SEQ ID NO: 13 - DNA, 1260 bp, Issatchenkia orientalis
atgtccagaggcttctttactgagaacattacgcaattgccaccagaccctttgtttggtcttaaggccaggttcagcaatgactcacgtgaaaacaaggtcgatttaggtattggggcatatagggacgacaacggtaagccatggatcttaccatctgtcaggttggccgaaaacttgattcagaactccccagactacaaccatgagtacctaccaatcggtggacttgctgatttcacttctgctgcggcaagagttgtatttggaggcgattctaaagccatttcgcaaaaccgtcttgtctccatccagagtttgtcaggtacaggtgccttacatgttgctggtctatttatcaagcgccaatacaagtctcttgatggcacttccgaagaccctctaatatatctatcggaacctacatgggccaaccacgttcaaatctttgaagttattggtctcaagcctgtattctatccatattggcatgccgcaagcaagaccttggatctgaagggctacttaaaggcaataaacgatgctccagaagggtcggtttttgtattgcatgcaacggctcataaccctactggtttggatccaacacaagaacaatggatggagattttggccgctataagtgccaaaaagcatctgccattatttgattgtgcatatcagggtttcacctccgggtctctagatagagatgcttgggctgttcgagaagctgtcaacaatgacaagtacgaattcccgggaattattgtctgtcaatcgtttgcgaaaaatgttggcatgtatggtgaacggattggtgcagttcatattgttctacctgaatcagacgcttccctaaacagcgccatcttctcccaattgcaaaagacaatcagatcggagatttccaatccaccaggatacggtgcaaagattgtgtctaaagttttgaacactccggaactttacaaacagtgggagcaagatttgatcaccatgtcttcgagaatcactgcaatgagaaaggagctagtaaatgagctcgagcgtcttggaacccctggcacttggagacacatcaccgagcaacagggtatgttttcctttactggtttgaacccggagcaggttgccaagctagagaaggagcatggtgtttatcttgttcgtagtggacgtgcaagtattgcaggcctcaacatgggaaacgtcaagtatgttgccaaggccattgactctgtcgtgagagacctttag

SEQ ID NO: 14 - protein, 419 aa, Issatchenkia orientalis
MSRGFFTENITQLPPDPLFGLKARFSNDSRENKVDLGIGAYRDDNGKPWILPSVRLAENLIQNSPDYNHEYLPIGGLADFTSAAARVVFGGDSKAISQNRLVSIQSLSGTGALHVAGLFIKRQYKSLDGTSEDPLIYLSEPTWANHVQIFEVIGLKPVFYPYWHAASKTLDLKGYLKAINDAPEGSVFVLHATAHNPTGLDPTQEQWMEILAAISAKKHLPLFDCAYQGFTSGSLDRDAWAVREAVNNDKYEFPGIIVCQSFAKNVGMYGERIGAVHIVLPESDASLNSAIFSQLQKTIRSEISNPPGYGAKIVSKVLNTPELYKQWEQDLITMSSRITAMRKELVNELERLGTPGTWRHITEQQGMFSFTGLNPEQVAKLEKEHGVYLVRSGRASIAGLNMGNVKYVAKAIDSVVRDL

SEQ ID NO: 15 - protein, 418 aa, Saccharomyces cerevisiae
MSATLFNNIELLPPDALFGIKQRYGQDQRATKVDLGIGAYRDDNGKPWVLPSVKAAEKLIHNDSSYNHEYLGITGLPSLTSNAAKIIFGTQSDAFQEDRVISVQSLSGTGALHISAKFFSKFFPDKLVYLSKPTWANHMAIFENQGLKTATYPYWANETKSLDLNGFLNAIQKAPEGSIFVLHSCAHNPTGLDPTSEQWVQIVDAIASKNHIALFDTAYQGFATGDLDKDAYAVRLGVEKLSTVSPVFVCQSFAKNAGMYGERVGCFHLALTKQAQNKTIKPAVTSQLAKIIRSEVSNPPAYGAKIVAKLLETPELTEQWHKDMVTMSSRITKMRHALRDHLVKLGTPGNWDHIVNQCGMFSFTGLTPQMVKRLEETHAVYLVASGRASIAGLNQGNVEYVAKAIDEVVRFYTIEAKL

SEQ ID NO: 16 - protein, 396 aa, Escherichia coli
MFENITAAPADPILGLADLFRADERPGKINLGIGVYKDETGKTPVLTSVKKAEQYLLENETTKNYLGIDGIPEFGRCTQELLFGKGSALINDKRARTAQTPGGTGALRVAADFLAKNTSVKRVWVSNPSWPNHKSVFNSAGLEVREYAYYDAENHTLDFDALINSLNEAQAGDVVLFHGCCHNPTGIDPTLEQWQTLAQLSVEKGWLPLFDFAYQGFARGLEEDAEGLRAFAAMHKELIVASSYSKNFGLYNERVGACTLVAADSETVDRAFSQMKAAIRANYSNPPAHGASVVATILSNDALRAIWEQELTDMRQRIQRMRQLFVNTLQEKGANRDFSFIIKQNGMFSFSGLTKEQVLRLREEFGVYAVASGRVNVAGMTPDNMAPLCEAIVAVL

SEQ ID NO: 17 - protein, 139 aa, Streptomyces avermitilis
MLRTMFKSKIHRATVTQADLHYVGSVTIDADLLDAADLLPGELVHIVDITNGARLETYVIEGERGSGVVGINGAAAHLVHPGDLVIIISYAQVSDAEARALRPRVVHVDRDNRVVALGADPAEPVPGSDQARSPQAVTA

SEQ ID NO: 18 - protein, 127 aa, Clostridium acetobutylicum
MHLNMLKSKIHRATVVQADLNYVGSITIDRNLMDKANILEYEKVEIANINNGARFETYVIAGEAGSGIICLNGAAARCAQAGDKVIIMCYCSLTPEEASEHRPKVVFVNDDNSISNVTEYEKHGTIG

SEQ ID NO: 19 - DNA, 1404 bp, Issatchenkia orientalis
atgtctattagtgaaaaatattttcctcaagaacctcaatctcctgaattgaaaactgcaattccaggtcctcaatcaaaggcaaagctcgaggaattatctgctgtctatgatacaaaggctgcatattttgttaccgactactacaaatctcttggtaactatattgtggatgcagatggcaacaagctactagattcttattgccaaatctcttctatcgcattgggttacaataatccagcattattaaaagtagcacattctgatgaaatgacagttgctttatgtaacagacctgctttggcatgttttccatccactgattactatgaaatactaaagaagggattgttgtccgttgctccaaagggattagataaggtttgtactgcacacacgggatctgatgccaatgaaatggcatttaaggctgcatttttgtttcaagcaagtaagaagagaggtgacaaaccatttaccagcgaagagctggaatctgtcatggagaacaagttgccaggcacctctgacatggttatcctgtcatttgaaaaagggttccatggtagattgtttggatctttatctaccactagatctaaagctattcacaaactggatattcctgcgtttgaatggccaaaggctccattccctcagttaaagtatcctctggatcaattccaagctgaaaacaaagcagaagaagaaagatgtttgaaggctttagaggaaattattgtcaactctcctgccaaaattgcagctgcaatcattgaaccggtccaatctgaaggtggtgataatcatgcttcaccagaattcttccaaggtattagagaaatcaccaaaaagcacggtgtcattcttattgttgatgaagttcaaacaggaggtggtgcttctggtaagatgtggttacatgaacactatggcattgtcccagacatcatgactttttctaaaaaaatgcaaaatgcaggtttctttttcagtgaagcaggtcttgctggggaccaaccattcagacaattcaatacctggtgcggtgatccatcaaaagctctaattgcaagaaccataattgaagaaattaaagataagaacctattgactagtgttaccgaaacaggtgactacctatattcaaagctcgaagcaatttcagcaaagtatgacaaaatgatcaacttgagaggtaagggaagaggtttctttattgcatttgatgccccaacaccggagttaagaaacaaatttattgctgaatgtaagaaattaggtttaaacattggtggatgcggtgaacaaggtgttagattgagacctgcattagtttttgaaaagaagcatgctgatatcttagcctccattattgatcaagctttttccaaaatttaa

SEQ ID NO: 20 - protein, 467 aa, Issatchenkia orientalis
MSISEKYFPQEPQSPELKTAIPGPQSKAKLEELSAVYDTKAAYFVTDYYKSLGNYIVDADGNKLLDSYCQISSIALGYNNPALLKVAHSDEMTVALCNRPALACFPSTDYYEILKKGLLSVAPKGLDKVCTAHTGSDANEMAFKAAFLFQASKKRGDKPFTSEELESVMENKLPGTSDMVILSFEKGFHGRLFGSLSTTRSKAIHKLDIPAFEWPKAPFPQLKYPLDQFQAENKAEEERCLKALEEIIVNSPAKIAAAIIEPVQSEGGDNHASPEFFQGIREITKKHGVILIVDEVQTGGGASGKMWLHEHYGIVPDIMTFSKKMQNAGFFFSEAGLAGDQPFRQFNTWCGDPSKALIARTIIEEIKDKNLLTSVTETGDYLYSKLEAISAKYDKMINLRGKGRGFFIAFDAPTPELRNKFIAECKKLGLNIGGCGEQGVRLRPALVFEKKHADILASIIDQAFSKI

SEQ ID NO: 21 - protein, 475 aa, Saccharomyces kluyveri
MPSYSVAELYYPDEPTEPKISTSSYPGPKAKQELEKLSNVFDTRAAYLLADYYKSRGNYIVDQDGNVLLDVYAQISSIALGYNNPEILKVAKSDAMSVALANRPALACFPSNDYGQLLEDGLLKAAPQGQDKIWTALSGSDANETAFKACFMYQAAKKRNGRSFSTEELESVMDNQLPGTSEMVICSFEKGFHGRLFGSLSTTRSKPIHKLDIPAFNWPKAPFPDLKYPLEENKEANKAEESSCIEKFSQIVQEWQGKIAAVIIEPIQSEGGDNHASSDFFQKLREITIENGILMIVDEVQTGVGATGKMWAHEHWNLSNPPDLVTFSKKFQAAGFYYHDPKLQPDQPFRQFNTWCGDPSKALIAKVIYEEIVKHDLVTRTAEVGNYLFNRLEKLFEGKNYIQNLRGKGQGTYIAFDFGTSSERDSFLSRLRCNGANVAGCGDSAVRLRPSLTFEEKHADVLVSIFDKTLRQLYG

SEQ ID NO: 22 - protein, 451 aa, Streptomyces avermitilis
MTPQPNPQVGAAVKAADRAHVFHSWSAQELIDPLAVAGAEGSYFWDYDGRRYLDFTSGLVFTNIGYQHPKVVAAIQEQAASLTTFAPAFAVEARSEAARLIAERTPGDLDKIFFTNGGADAIEHAVRMARIHTGRPKVLSAYRSYHGGTQQAVNITGDPRRWASDSASAGVVHFWAPYLYRSRFYAETEQQECERALEHLETTIAFEGPGTIAAIVLETVPGTAGIMVPPPGYLAGVRELCDKYGIVFVLDEVMAGFGRTGEWFAADLFDVTPDLMTFAKGVNSGYVPLGGVAISGKIAETFGKRAYPGGLTYSGHPLACAAAVATINVMAEEGVVENAANLGARVIEPGLRELAERHPSVGEVRGVGMFWALELVKDRETREPLVPYNAAGEANAPMAAFGAAAKANGLWPFINMNRTHVVPPCNVTEAEAKEGLAALDAALSVADEYTV

SEQ ID NO: 23 - protein, 419 aa, Streptomyces avermitilis
MSALSPHLRQATPVVAVRGEGVHLYGEDGRRYLDFTAGIGVTSTGHCHPRVVAAAQEQAGTLVHGQYTTVLHPPLRRLVDRLGEVLPAGLDSLFFTNSGSEAVEAALRLARQATGRPNVLVCHGGFHGRTVAAAAMTTSGTRFRSGFSPLMSGVVVTPFPTAFRYGWDEETATRFALQELDYTLRTISSPDDTAAIIVEPVLGEGGYVPATRAFLEGLRERADRHGFVLILDEVQTGVGRTGRFWGHDHFGVTPDILITAKGLASGFPLSGIAASAELMGKAWPGSQGGTYGANAVACAAACATLDVVRDEKLVDNAEAMGARLRAGLAAVAATTPAIGDVRGLGLMLASEFVTEDGGPDPETAARVQRAAVDEGLLLLLCGAWNQVVRMIPALVIDEAEVDEGLRAWSAAVEVGVPAR

SEQ ID NO: 24 - protein, 471 aa, Saccharomyces cerevisiae
MSICEQYYPEEPTKPTVKTESIPGPESQKQLKELGEVFDTRPAYFLADYEKSLGNYITDVDGNTYLDLYAQISSIALGYNNPALIKAAQSPEMIRALVDRPALGNFPSKDLDKILKQILKSAPKGQDHVWSGLSGADANELAFKAAFIYYRAKQRGYDADFSEKENLSVMDNDAPGAPHLAVLSFKRAFHGRLFASGSTTCSKPIHKLDFPAFHWPHAEYPSYQYPLDENSDANRKEDDHCLAIVEELIKTWSIPVAALIIEPIQSEGGDNHASKYFLQKLRDITLKYNVVYIIDEVQTGVGATGKLWCHEYADIQPPVDLVTFSKKFQSAGYFFHDPKFIPNKPYRQFNTWCGEPARMIIAGAIGQEISDKKLTEQCSRVGDYLFKKLEGLQKKYPENFQNLRGKGRGTFIAWDLPTGEKRDLLLKKLKLNGCNVGGCAVHAVRLRPSLTFEEKHADIFIEALAKSVNEL

SEQ ID NO: 25 - DNA, 813 bp, Issatchenkia orientalis
atgtttggtaatatttcccaaagacttgcaggcaagaacatcctaattacaggtgcgtccactggtatcggataccatacagcaaagtattttgcagaagctgcaaatggagacttgaagttggttttggctgcaagaagaaaggagaagctggaggcactaaaggcagacttgcttgccaagtatccatccatcaaagtccatattgagagtttggatgtctccaaaacggaaaccattgcacctttcttaaaaggtttacctgaggaattttcaattgtcgacgtgttggtcaacaatgcaggtaaggcgcttggtttggatccaattggctctgtcgatccaaaggacgtggatgaaatgttccagaccaatgttttgggtatgattcaattgacccagttggttgtacagcaaatgaaggagagaaactccggggacattgtccaactaggttcagtggctggtagaaacccatacccaggtggtggtatctactgtgcctccaaggccgcattgagatcttttacacatgtattgagagaggaattgattaataccaagattagagtgattgaaatcgagcctggaaatgttgcaactgaggaattttctttgaccagattcaaaggtgataagtccaaggccgaaaaggtctatgagggaaccgagccattgtatggtaccgatattgcagaattgattctatttgcagtttctagacctcaaaacactgttattgcagaaacacttgtttttgctagtaaccaagcttctgcttaccatattttcagaggatcattagataaatag

SEQ ID NO: 26 - protein, 270 aa, Issatchenkia orientalis
MFGNISQRLAGKNILITGASTGIGYHTAKYFAEAANGDLKLVLAARRKEKLEALKADLLAKYPSIKVHIESLDVSKTETIAPFLKGLPEEFSIVDVLVNNAGKALGLDPIGSVDPKDVDEMFQTNVLGMIQLTQLVVQQMKERNSGDIVQLGSVAGRNPYPGGGIYCASKAALRSFTHVLREELINTKIRVIEIEPGNVATEEFSLTRFKGDKSKAEKVYEGTEPLYGTDIAELILFAVSRPQNTVIAETLVFASNQASAYHIFRGSLDK

SEQ ID NO: 27 - protein, 248 aa, Escherichia coli
MIVLVTGATAGFGECITRRFIQQGHKVIATGRRQERLQELKDELGDNLYIAQLDVRNRAAIEEMLASLPAEWCNIDILVNNAGLALGMEPAHKASVEDWETMIDTNNKGLVYMTRAVLPGMVERNHGHIINIGSTAGSWPYAGGNVYGATKAFVRQFSLNLRTDLHGTAVRVTDIEPGLVGGTEFSNVRFKGDDGKAEKTYQNTVALTPEDVSEAVWWVSTLPAHVNINTLEMMPVTQSYAGLNVHRQ

SEQ ID NO: 28 - protein, 298 aa, Alcaligenes faecalis
MSNTIAFIGLGHMGKPMALNLLKAGHSLNVFDLNAQAMQELQAAGAQVGESAVQIAQDAQMVFTMLPAGRHVRQVYEGENGLLQTVAPGTVLVDCSTIDAQTSQDLAAKASKLGLFMLDAPVSGGTGGAIAGTLTFMVGGEDQALEKARPYLDAMGKNIFHAGKAGAGQVAKICNNMLLGILMAGTAEALALGVAHGLDPAVLSTIMARSSGRNWATELYNPWPGVMPDVPASRDYQGGFATGLMLKDLGLAADAAVSQNSATPLGELARNLFALHAAQGQNAGLDFSSILNLYRQKH

SEQ ID NO: 29 - protein, 314 aa, Metallosphaera sedula
MTEKVSVVGAGVIGVGWATLFASKGYSVSLYTEKKETLDKGIEKLRNYVQVMKNNSQITEDVNTVISRVSPTTNLDEAVRGANFVIEAVIEDYDAKKKIFGYLDSVLDKEVILASSTSGLLITEVQKAMSKHPERAVIAHPWNPPHLLPLVEIVPGEKTSMEVVERTKSLMEKLDRIVVVLKKEIPGFIGNRLAFALFREAVYLVDEGVATVEDIDKVMTAAIGLRWAFMGPFLTYHLGGGEGGLEYFFNRGFGYGANEWMHTLAKYDKFPYTGVTKAIQQMKEYSFIKGKTFQEISKWRDEKLLKVYKLVWEK

SEQ ID NO: 30 - protein, 295 aa, Pseudomonas putida
MRIAFIGLGNMGAPMARNLIKAGHQLNLFDLNKAVLAELAELGGQISPSPKDAAANSELVITMLPAAAHVRSVYLNEDGVLAGIRPGTPTVDCSTIDPQTARDVSKAAAAKGVDMGDAPVSGGTGGAAAGTLTFMVGASTELFASLKPVLEQMGRNIVHCGEVGTGQIAKICNNLLLGISMIGVSEAMALGNALGIDTKVLAGIINSSTGRCWSSDTYNPWPGIIETAPASRGYTGGFGAELMLKDLGLATEAARQAHQPVILGAVAQQLYQAMSLRGEGGKDFSAIVEGYRKKD

SEQ ID NO: 31 - protein, 295 aa, Pseudomonas putida
MRIAFIGLGNMGAPMARNLIKAGHQLNLFDLNKTVLAELAELGGQISPSPKDAAASSELVITMLPAAAHVRSVYLNDDGVLAGIRPGTPTVDCSTIDPQTARDVSKAAAAKGVDMGDAPVSGGTGGAAAGTLTFMVGASAELFASLKPVLEQMGRNIVHCGEVGTGQIAKICNNLLLGISMIGVSEAMALGNALGIDTKVLAGIINSSTGRCWSSDTYNPWPGIIETAPASRGYTGGFGAELMLKDLGLATEAARQAHQPVILGAVAQQLYQAMSLRGEGGKDFSAIVEGYRKKD

SEQ ID NO: 32 - protein, 298 aa, Pseudomonas aeruginosa
MTDIAFLGLGNMGGPMAANLLKAGHRVNVFDLQPKAVLGLVEQGAQGADSALQCCEGAEVVISMLPAGQHVESLYLGDDGLLARVAGKPLLIDCSTIAPETARKVAEAAAAKGLTLLDAPVSGGVGGARAGTLSFIVGGPAEGFARARPVLENMGRNIFHAGDHGAGQVAKICNNMLLGILMAGTAEALALGVKNGLDPAVLSEVMKQSSGGNWALNLYNPWPGVMPQAPASNGYAGGFQVRLMNKDLGLALANAQAVQASTPLGALARNLFSLHAQADAEHEGLDFSSIQKLYRGKD

SEQ ID NO: 33 - protein, 382 aa, Ralstonia eutropha
MAFIYYLTHIHLDFGAVSLLKSECERIGIRRPLLVTDKGVVAAGVAQRAIDAMQGLQVAVFDETPSNPTEAMVRKAAAQYREAGCDGLVAVGGGSSIDLAKGIAILATHEGELTTYATIEGGSARITDKAAPLIAVPTTSGTGSEVARGAIIILDDGRKLGFHSWHLLPKSAVCDPELTLGLPAGLTAATGMDAIAHCIETFLAPAFNPPADGIALDGLERGWGHIERATRDGQDRDARLNMMSASMQGAMAFQKGLGCVHSLSHPLGGLKIDGRTGLHHGTLNAVVMPAVLRFNADAPTVVRDDRYARLRRAMHLPDGADIAQAVHDMTVRLGLPTGLRQMGVTEDMFDKVIAGALVDHCHKTNPKEASAADYRRMLEQSM

SEQ ID NO: 34 - protein, 371 aa, Clostridium kluyveri
MKLLKLAPDVYKFDTAEEFMKYFKVGKGDFILTNEFLYKPFLEKFNDGADAVFQEKYGLGEPSDEMINNIIKDIGDKQYNRIIAVGGGSVIDIAKILSLKYTDDSLDLFEGKVPLVKNKELIIVPTTCGTGSEVTNVSVAELKRRHTKKGIASDELYATYAVLVPEFIKGLPYKFFVTSSVDALIHATEAYVSPNANPYTDMFSVKAMELILNGYMQMVEKGNDYRVEIIEDFVIGSNYAGIAFGNAGVGAVHALSYPIGGNYHVPHGEANYLFFTEIFKTYYEKNPNGKIKDVNKLLAGILKCDESEAYDSLSQLLDKLLSRKPLREYGMKEEEIETFADSVIEGQQRLLVNNYEPFSREDIVNTYKKLY

SEQ ID NO: 35 - protein, 538 aa, Mannheimia succiniciproducens
MTDLNQLTQELGALGIHDVQEVVYNPSYELLFAEETKPGLEGYEKGTVTNQGAVAVNTGIFTGRSPKDKYIVLDDKTKDTVWWTSEKVKNDNKPMSQDTWNSLKGLVADQLSGKRLFVVDAFCGANKDTRLAVRVVTEVAWQAHFVTNMFIRPSAEELKGFKPDFVVMNGAKCTNPNWKEQGLNSENFVAFNITEGVQLIGGTWYGGEMKKGMFSMMNYFLPLRGIASMHCSANVGKDGDTAIFFGLSGTGKTTLSTDPKRQLIGDDEHGWDDEGVFNFEGGCYAKTINLSAENEPDIYGAIKRDALLENVVVLDNGDVDYADGSKTENTRVSYPIYHIQNIVKPVSKAGPATKVIFLSADAFGVLPPVSKLTPEQTKYYFLSGFTAKLAGTERGITEPTPTFSACFGAAFLSLHPTQYAEVLVKRMQESGAEAYLVNTGWNGTGKRISIKDTRGIIDAILDGSIDKAEMGSLPIFDFSIPKALPGVNPAILDPRDTYADKAQWEEKAQDLAGRFVKNFEKYTGTAEGQALVAAGPKA

SEQ ID NO: 36 - protein, 532 aa, Anaerobiospirillum succiniciproducens
MSLSESLAKYGITGATNIVHNPSHEELFAAETQASLEGFEKGTVTEMGAVNVMTGVYTGRSPKDKFIVKNEASKEIWWTSDEFKNDNKPVTEEAWAQLKALAGKELSNKPLYVVDLFCGANENTRLKIRFVMEVAWQAHFVTNMFIRPTEEELKGFEPDFVVLNASKAKVENFKELGLNSETAVVFNLAEKMQIILNTWYGGEMKKGMFSMMNFYLPLQGIAAMHCSANTDLEGKNTAIFFGLSGTGKTTLSTDPKRLLIGDDEHGWDDDGVFNFEGGCYAKVINLSKENEPDIWGAIKRNALLENVTVDANGKVDFADKSVTENTRVSYPIFHIKNIVKPVSKAPAAKRVIFLSADAFGVLPPVSILSKEQTKYYFLSGFTAKLAGTERGITEPTPTFSSCFGAAFLTLPPTKYAEVLVKRMEASGAKAYLVNTGWNGTGKRISIKDTRGIIDAILDGSIDTANTATIPYFNFTVPTELKGVDTKILDPRNTYADASEWEVKAKDLAERFQKNFKKFESLGGDLVKAGPQL

SEQ ID NO: 37 - protein, 538 aa, Actinobacillus succinogenes
MTDLNKLVKELNDLGLTDVKEIVYNPSYEQLFEEETKPGLEGFDKGTLTTLGAVAVDTGIFTGRSPKDKYIVCDETTKDTVWWNSEAAKNDNKPMTQETWKSLRELVAKQLSGKRLFVVEGYCGASEKHRIGVRMVTEVAWQAHFVKNMFIRPTDEELKNFKADFTVLNGAKCTNPNWKEQGLNSENFVAFNITEGIQLIGGTWYGGEMKKGMFSMMNYFLPLKGVASMHCSANVGKDGDVAIFFGLSGTGKTTLSTDPKRQLIGDDEHGWDESGVFNFEGGCYAKTINLSQENEPDIYGAIRRDALLENVVVRADGSVDFDDGSKTENTRVSYPIYHIDNIVRPVSKAGHATKVIFLTADAFGVLPPVSKLTPEQTEYYFLSGFTAKLAGTERGVTEPTPTFSACFGAAFLSLHPIQYADVLVERMKASGAEAYLVNTGWNGTGKRISIKDTRGIIDAILDGSIEKAEMGELPIFNLAIPKALPGVDPAILDPRDTYADKAQWQVKAEDLANRFVKNFVKYTANPEAAKLVGAGPKA

SEQ ID NO: 38 - protein, 618 aa, Ralstonia eutropha
MNHPSMQGTTALNVPAWVRNQKLVAWVAEIAALTKPERIHWCDGSQEEYDRLCEQMVAAGTLKRLNPAKRKNSYLALSDPSDVARVEDRTFICSQKKEDAGPTNNWVAPAEMRTTLNGLFDGCMRGRTLYVVPFSMGPLGSPIAHIGVELSDSPYVAVNMRIMTRMGKAVYDVLGTDGDFVPCVHTVGKPLAAGEKDVPWPCNPTKYIVHFPESREIWSFGSGYGGNALLGKKCFALRIASTMGRDEGWLAEHMLILGVTSPEGKKFHVAAAFPSACGKTNFAMLIPPKGFEGWKVTTIGDDIAWIKPGKDGRLYAINPEAGYFGVAPGTSEKTNFNAMATLKENVIFTNVALTDDGDVWWEGMTKEAPAHLTDWQGKDWTPEIAKATGAKAAHPNARFTAPASQCPSIDENWDNPAGVPIDAFIFGGRRSTTVPLVTEARNWTEGVYMAATMGSETTAAAAGQQGVVRRDPFAMLPFCGYNMSDYFGHWLALGQKLEAAGAKLPKIYCVNWFRKDADGNFVWPGFGENMRVLSWMIDRVEGKGEGAEHVFGTSPRYEDLNWSGVEFSVAQFTQVTSIDADAWKQELALHDELFTQLKHNLPQALAEARAALGKRLEG

SEQ ID NO: 39 - protein, 540 aa, Escherichia coli
MRVNNGLTPQELEAYGISDVHDIVYNPSYDLLYQEELDPSLTGYERGVLTNLGAVAVDTGIFTGRSPKDKYIVRDDTTRDTFWWADKGKGKNDNKPLSPETWQHLKGLVTRQLSGKRLFVVDAFCGANPDTRLSVRFITEVAWQAHFVKNMFIRPSDEELAGFKPDFIVMNGAKCTNPQWKEQGLNSENFVAFNLTERMQLIGGTWYGGEMKKGMFSMMNYLLPLKGIASMHCSANVGEKGDVAVFFGLSGTGKTTLSTDPKRRLIGDDEHGWDDDGVFNFEGGCYAKTIKLSKEAEPEIYNAIRRDALLENVTVREDGTIDFDDGSKTENTRVSYPIYHIDNIVKPVSKAGHATKVIFLTADAFGVLPPVSRLTADQTQYHFLSGFTAKLAGTERGITEPTPTFSACFGAAFLSLHPTQYAEVLVKRMQAAGAQAYLVNTGWNGTGKRISIKDTRAIIDAILNGSLDNAETFTLPMFNLAIPTELPGVDTKILDPRNTYASPEQWQEKAETLAKLFIDNFDKYTDTPAGAALVAAGPKL

SEQ ID NO: 40 - protein, 236 aa, Lactococcus lactis
MSEITQLFQYNTLGALMAGLYEGTMTIGELLKHGDLGIGTLDSIDGELIVLDGKAYQAKGDKTIVELTDDIKVPYAAVVPHQAEVVFKQKFTVSDKELEDRIESYFDGQNLFRSIKITGKFPKMHVRMIPRAKSGTKFVEVSQNQPEYTEENIKGTIVGIWTPEMFHGVSVAGYHLHFISEDFTFGGHVLDFIIDNGTVEIGAIDQLNQSFPVQDRKFLFADLDIEALKKDIDVAE

SEQ ID NO: 41 - protein, 239 aa, Streptococcus thermophilus
MSEAIKLFQYNTLGALMAGLYGGTLTVGELLEHGDLGLGTLDSIDGELIVLDGKAYQAKGSEGKVEVVEVSPDEKVPYAAVVPHQAEVIFRQRYEMTDKELEDRIESYYDGVNLFRSIKIKGHFKHMHVRMIPKSNADIKFADVATRQPEYEVDDISGTIVGIWTPEMFHGVSVAGYHLHFISDDLTFGGHVMDFVIENGIIEVGPVDQLDQRFPVQDRQYLFAKFNVDEMRKDITKAE

SEQ ID NO: 42 - protein, 285 aa, Brevibacillus brevis
MKKNIITSITSLALVAGLSLTAFAATTATVPAPPAKQESKPAVAANPAPKNVLFQYSTINALMLGQFEGDLTLKDLKLRGDMGLGTINDLDGEMIQMGTKFYQIDSTGKLSELPESVKTPFAVTTHFEPKEKTTLTNVQDYNQLTKMLEEKFENKNVFYAVKLTGTFKMVKARTVPKQTRPYPQLTEVTKKQSEFEFKNVKGTLIGFYTPNYAAALNVPGFHLHFITEDKTSGGHVLNLQFDNANLEISPIHEFDVQLPHTDDFAHSDLTQVTTSQVHQAESERK

SEQ ID NO: 43 - protein, 259 aa, Enterobacter aerogenes
MMMHSSACDCEASLCETLRGFSAQHPDSVIYQTSLMSALLSGVYVGETTIADLLAHGDFGLGTFNELDGEMIAFSSQVYQLRADGSARAAKPEQKTPFAVMTWFQPQYRKTFNGPVSRQQIHDVIDQQIPSDNLFCVRIDGNFRHAHTRTVPRQTPPYRAMTDVLDDQPVFRFNQREGVLVGFRTPQHMQGINVAGYHEHFITDDRQGGGHLLDYQLESGVLTFGEIHKLMIDLPADSAFLQANLHPSNLDAAIRAVEN

SEQ ID NO: 44 - protein, 1231 aa, Mycobacterium tuberculosis
MANISSPFGQNEWLVEEMYRKFRDDPSSVDPSWHEFLVDYSPEPTSQPAAEPTRVTSPLVAERAAAAAPQAPPKPADTAAAGNGVVAALAAKTAVPPPAEGDEVAVLRGAAAAVVKNMSASLEVPTATSVRAVPAKLLIDNRIVINNQLKRTRGGKISFTHLLGYALVQAVKKFPNMNRHYTEVDGKPTAVTPAHTNLGLAIDLQGKDGKRSLVVAGIKRCETMRFAQFVTAYEDIVRRARDGKLTTEDFAGVTISLTNPGTIGTVHSVPRLMPGQGAIIGVGAMEYPAEFQGASEERIAELGIGKLITLTSTYDHRIIQGAESGDFLRTIHELLLSDGFWDEVFRELSIPYLPVRWSTDNPDSIVDKNARVMNLIAAYRNRGHLMADTDPLRLDKARFRSHPDLEVLTHGLTLWDLDRVFKVDGFAGAQYKKLRDVLGLLRDAYCRHIGVEYAHILDPEQKEWLEQRVETKHVKPTVAQQKYILSKLNAAEAFETFLQTKYVGQKRFSLEGAESVIPMMDAAIDQCAEHGLDEVVIGMPHRGRLNVLANIVGKPYSQIFTEFEGNLNPSQAHGSGDVKYHLGATGLYLQMFGDNDIQVSLTANPSHLEAVDPVLEGLVRAKQDLLDHGSIDSDGQRAFSVVPLMLHGDAAFAGQGVVAETLNLANLPGYRVGGTIHIIVNNQIGFTTAPEYSRSSEYCTDVAKMIGAPIFHVNGDDPEACVWVARLAVDFRQRFKKDVVIDMLCYRRRGHNEGDDPSMTNPYVYDVVDTKRGARKSYTEALIGRGDISMKEAEDALRDYQGQLERVFNEVRELEKHGVQPSESVESDQMIPAGLATAVDKSLLARIGDAFLALPNGFTAHPRVQPVLEKRREMAYEGKIDWAFGELLALGSLVAEGKLVRLSGQDSRRGTFSQRHSVLIDRHTGEEFTPLQLLATNSDGSPTGGKFLVYDSPLSEYAAVGFEYGYTVGNPDAVVLWEAQFGDFVNGAQSIIDEFISSGEAKWGQLSNVVLLLPHGHEGQGPDHTSARIERFLQLWAEGSMTIAMPSTPSNYFHLLRRHALDGIQRPLIVFTPKSMLRHKAAVSEIKDFTEIKFRSVLEEPTYEDGIGDRNKVSRILLTSGKLYYELAARKAKDNRNDLAIVRLEQLAPLPRRRLRETLDRYENVKEFFWVQEEPANQGAWPRFGLELPELLPDKLAGIKRISRRAMSAPSSGSSKVHAVEQQEILDEAFG

SEQ ID NO: 45 - protein, 985 aa, Bradyrhizobium japonicum
MSRQDANAAFALSSFLQGTNATYIDEIYARYEKDPSSVDAEWQEFFKSLKDQPDDVRRNAEGPSWERANWPLTPQDDLTSALDGNWAEVEKAVGGKIAAKAQAKGADISSADLLQATRDSVRALMLIRSYRMRGHFHAKLDPLGIEAPRNREELDPRTYGFSEADFDRKIFLDHVLGLEYGTLREITAICERTYCQTLGVEFMHISNAAQKAWIQERIEGPDKEISFTREGRRAILTKLVEAEGFEKFCDTKFTGTKRFGLDGAESLIPALEQIIKRGGNLGVKEIVLGMPHRGRLNVLTQVMGKAHRALFHEFKGGSANPDAVEGSGDVKYHLGASSDREFDGNRIHLSLTANPSHLEIVDPVVLGKVRAKQDQHGDPPDMRISVMPLLMHGDAAFAGQGVVAECFGLSDLKGYRTGGSVHFIVNNQIGFTTYPRYSRSSPYPSDVAKMIDAPIFHVNGDDPEAVVFAAKVATEFRQKFHKPVVIDMFCYRRHGHNEGDEPAFTQPVMYKKIAAHPSTLELYARRLISEGVMTEGEVDKAKADWRARLDAEFEAGTSYKPNKADWLDGKWAGFKIADQEEDARRGVTGVDITALKDIGRKITKVPDGFRVHRTIQRFLENRSKAIDSGAGIDWATGEALAFCSLLNENHHVRLSGQDSERGTFSQRHSVLIDQEDESRYTPFNHLGHEQGHYEVINSLLSEEAVLGFEYGYSLAEPNTLTLWEAQFGDFANGAQVVFDQFISSGERKWLRMSGLVCLLPHGYEGQGPEHSSARLERYLQMCAEDNMQVVYPTTPANYFHVLRRQLHREIRKPLILMTPKSLLRHKRAVSRLEELAKGTTFHRILYDDAQMLPTDAIKLVPDEKIRRIVLCSGKVYYDLYEEREKRGIDDIYLMRVEQLYPVPLKALVAELSRFKKAEVVWCQEEPRNMGAWHFIEPYLEWVLNQVNGVSRRPRYVGRAASAATATGLMSKHQAQLKAFLDEALS

SEQ ID NO: 46 - protein, 995 aa, Rhizobium loti
MARQDQTNDQFSLTSFLYGGNADYIDALYAAYEDDPASVNPEWQEFFAGLKDDAGDVRRNAKGASWAKPSWPLQANGELVSALDGNWGIVEKHLEKKVKDKAVTNGVVLSDADVHQATRDSVRAIMMIRAYRMRGHLHANLDPLGIAKPLEDYNELSPENYGFTAADYDRPIFLDNVLGLEFGTIRQMLEILTRTYCSTLGVEFMHISDPEEKAWIQARIEGADKEISFTNTGKKAILQKLVEAEGFEQFIDVKYKGTKRFGLDGGEALIPALEQIVKRGGQLGMKEIVLGMAHRGRLNVLSQVMAKPHRAIFHEFKGGSAAPDEVEGSGDVKYHLGASSDREFDGNKVHLSLTANPSHLEIVDPVVMGKARAKQDYLFGRGREEIVPLEERAKVLPLLLHGDAAFAGQGVIAEILGLSGLRGHRVAGTLHFIINNQIGFTTNPRFSRSSPYPSDVAKMIEAPIFHVNGDDPEAVVHATKVAIEFRMKFHKPVVVDMFCYRRFGHNEGDEPAFTQPIMYRNIRTHKTTVQIYADRLIAEGHITQAELDQMKADWRAHLESEWEVGQHYKPNKADWLDGAWSGLRTADNQDEQRRGKTAVPVKTLKEIGKKLTEVPKGFEAHKTIIRFLENRREAIESGEGIDWSTAEALAFGAILLDGNPIRLSGQDSERGTFSQRHSVLYDQRDETRYIPLNNLSAAQAGYEVINSMLSEEAVLGFEYGYSLAEPKALTLWEAQFGDFANGAQVVFDQFISSGERKWLRMSGLVCLLPHGYEGQGPEHSSARLERFLQLCAEDNMQVANCTTPANYFHILRRQLKRDFRKPLILMTPKSLLRHKRAVSTLPEISGESSFHRLLWDDAQLLPNQPIKLTKDSKIRRVVLCSGKVYYDLYEEREKRGINDIYLLRVEQLYPFPAKALITELSRFRNAEMVWCQEEPKNMGAWSFIDPYLEWVLAHIDAKHQRVRYTGRPAAASPATGLMSKHLAQLAALLEDALGE

SEQ ID NO: 47 - protein, 547 aa, Lactococcus lactis
MYTVGDYLLDRLHELGIEEIFGVPGDYNLQFLDQIISREDMKWIGNANELNASYMADGYARTKKAAAFLTTFGVGELSAINGLAGSYAENLPVVEIVGSPTSKVQNDGKFVHHTLADGDFKHFMKMHEPVTAARTLLTAENATYEIDRVLSQLLKERKPVYINLPVDVAAAKAEKPALSLEKESSTTNTTEQVILSKIEESLKNAQKPVVIAGHEVISFGLEKTVTQFVSETKLPITTLNFGKSAVDESLPSFLGIYNGKLSEISLKNFVESADFILMLGVKLTDSSTGAFTHHLDENKMISLNIDEGIIFNKVVEDFDFRAVVSSLSELKGIEYEGQYIDKQYEEFIPSSAPLSQDRLWQAVESLTQSNETIVAEQGTSFFGASTIFLKSNSRFIGQPLWGSIGYTFPAALGSQIADKESRHLLFIGDGSLQLTVQELGLSIREKLNPICFIINNDGYTVEREIHGPTQSYNDIPMWNYSKLPETFGATEDRVVSKIVRTENEFVSVMKEAQADVNRMYWIELVLEKEDAPKLLKKMGKLFAEQNK

SEQ ID NO: 48 - DNA, 1728 bp, Issatchenkia orientalis
atgactgacaaaatctccctaggtacttatctgtttgaaaagttaaaggaagcaggctcttattccatctttggtgttcctggtgatttcaatttggcattgttggaccacgtcaaggaagttgaaggcattagatgggtcggtaacgctaacgagttgaatgccggctacgaagctgatggttatgcaagaatcaatggatttgcatccctaatcaccacctttggtgtcggtgaattgtctgccgtcaatgccattgcaggttcttatgctgaacacgtcccattgatccatattgttggtatgccttccttgtctgctatgaagaacaacttgttgttacaccataccttgggtgacacaagattcgacaacttcaccgaaatgtcaaagaaaatcagtgcaaaggttgaaattgtttacgatttggaatcagctccaaaattaattaataacttgattgaaaccgcttatcacacaaagagaccagtctacttgggacttccttccaactttgctgatgaattggttccagcggcattagttaaggaaaacaagttacatttagaagaacctctaaacaaccccgttgctgaagaagaattcattcataacgttgttgaaatggtcaagaaggcagaaaaaccaatcattctcgttgacgcttgtgctgcaagacataacatttctaaggaagtgagagagttggctaaattgactaaattccctgtcttcaccaccccaatgggtaaatctactgttgatgaagatgatgaagaattctttggcttatacttgggttctctatctgctccagatgttaaggacattgttggcccaaccgattgtatcttatccttaggtggtttaccttctgatttcaacaccggttccttctcatatggttacaccactaagaatgtcgttgaattccattccaactactgtaaattcaaatctgcaacttatgaaaacttgatgatgaagggcgcagtccaaagattgatcagcgaattgaagaatattaagtattccaatgtctcaactttatctccaccaaaatctaaatttgcttacgaatctgcaaaggttgctccagaaggtatcatcactcaagattacctgtggaagagattatcttacttcttaaagccaagagatatcattgtcactgaaactggtacttcctcctttggtgtcttggctacccacttaccaagagattcaaagtctatctcccaagtcttatggggttccattggtttctccttaccagctgcagttggtgctgcatttgctgctgaagatgcacacaaacaaactggcgaacaagaaagaagaactgttttgtttattggtgatggttctttacaattgactgtccaatcaatctcagatgctgcaagatggaacatcaagccatacatcttcatcttaaacaacagaggttacactatcgaaaagttgatccacggtcgtcatgaggactacaaccaaattcaaccatgggatcaccaattgttattgaagctctttgctgacaagacccaatatgaaaaccatgttgttaaatccgctaaggacttggacgctttgatgaaggatgaagcattcaacaaggaagataagattagagtcattgaattattcttggatgaattcgatgctccagaaatcttggttgctcaagctaaattatctgatgaaatcaactctaaagccgcttaa

SEQ ID NO: 49 - protein, 575 aa, Issatchenkia orientalis
MTDKISLGTYLFEKLKEAGSYSIFGVPGDFNLALLDHVKEVEGIRWVGNANELNAGYEADGYARINGFASLITTFGVGELSAVNAIAGSYAEHVPLIHIVGMPSLSAMKNNLLLHHTLGDTRFDNFTEMSKKISAKVEIVYDLESAPKLINNLIETAYHTKRPVYLGLPSNFADELVPAALVKENKLHLEEPLNNPVAEEEFIHNVVEMVKKAEKPIILVDACAARHNISKEVRELAKLTKFPVFTTPMGKSTVDEDDEEFFGLYLGSLSAPDVKDIVGPTDCILSLGGLPSDFNTGSFSYGYTTKNVVEFHSNYCKFKSATYENLMMKGAVQRLISELKNIKYSNVSTLSPPKSKFAYESAKVAPEGIITQDYLWKRLSYFLKPRDIIVTETGTSSFGVLATHLPRDSKSISQVLWGSIGFSLPAAVGAAFAAEDAHKQTGEQERRTVLFIGDGSLQLTVQSISDAARWNIKPYIFILNNRGYTIEKLIHGRHEDYNQIQPWDHQLLLKLFADKTQYENHVVKSAKDLDALMKDEAFNKEDKIRVIELFLDEFDAPEILVAQAKLSDEINSKAA

SEQ ID NO: 50 - protein, 563 aa, Saccharomyces cerevisiae
MSEITLGKYLFERLKQVNVNTVFGLPGDFNLSLLDKIYEVEGMRWAGNANELNAAYAADGYARIKGMSCIITTFGVGELSALNGIAGSYAEHVGVLHVVGVPSISAQAKQLLLHHTLGNGDFTVFHRMSANISETTAMITDIATAPAEIDRCIRTTYVTQRPVYLGLPANLVDLNVPAKLLQTPIDMSLKPNDAESEKEVIDTILALVKDAKNPVILADACCSRHDVKAETKKLIDLTQFPAFVTPMGKGSIDEQHPRYGGVYVGTLSKPEVKEAVESADLILSVGALLSDFNTGSFSYSYKTKNIVEFHSDHMKIRNATFPGVQMKFVLQKLLTTIADAAKGYKPVAVPARTPANAAVPASTPLKQEWMWNQLGNFLQEGDVVIAETGTSAFGINQTTFPNNTYGISQVLWGSIGFTTGATLGAAFAAEEIDPKKRVILFIGDGSLQLTVQEISTMIRWGLKPYLFVLNNDGYTIEKLIHGPKAQYNEIQGWDHLSLLPTFGAKDYETHRVATTGEWDKLTQDKSFNDNSKIRMIEIMLPVFDAPQNLVEQAKLTAATNAKQ

SEQ ID NO: 51 - protein, 563 aa, Kluyveromyces lactis
MSEITLGRYLFERLKQVEVQTIFGLPGDFNLSLLDNIYEVPGMRWAGNANELNAAYAADGYARLKGMSCIITTFGVGELSALNGIAGSYAEHVGVLHVVGVPSVSSQAKQLLLHHTLGNGDFTVFHRMSSNISETTAMITDINTAPAEIDRCIRTTYVSQRPVYLGLPANLVDLTVPASLLDTPIDLSLKPNDPEAEEEVIENVLQLIKEAKNPVILADACCSRHDAKAETKKLIDLTQFPAFVTPMGKGSIDEKHPRFGGVYVGTLSSPAVKEAVESADLVLSVGALLSDFNTGSFSYSYKTKNIVEFHSDYTKIRSATFPGVQMKFALQKLLTKVADAAKGYKPVPVPSEPEHNEAVADSTPLKQEWVWTQVGEFLREGDVVITETGTSAFGINQTHFPNNTYGISQVLWGSIGFTTGATLGAAFAAEEIDPKKRVILFIGDGSLQLTVQEISTMIRWGLKPYLFVLNNDGYTIERLIHGETAQYNCIQNWQHLELLPTFGAKDYEAVRVSTTGEWNKLTTDEKFQDNTRIRLIEVMLPTMDAPSNLVKQAQLTAATNAKN

SEQ ID NO: 52 - protein, 568 aa, Zymomonas mobilis
MSYTVGTYLAERLVQIGLKHHFAVAGDYNLVLLDNLLLNKNMEQVYCCNELNCGFSAEGYARAKGAAAAVVTYSVGALSAFDAIGGAYAENLPVILISGAPNNNDHAAGHVLHHALGKTDYHYQLEMAKNITAAAEAIYTPEEAPAKIDHVIKTALREKKPVYLEIACNIASMPCAAPGPASALFNDEASDEASLNAAVEETLKFIANRDKVAVLVGSKLRAAGAEEAAVKFADALGGAVATMAAAKSFFPEENPHYIGTSWGEVSYPGVEKTMKEADAVIALAPVFNDYSTTGWTDIPDPKKLVLAEPRSVVVNGIRFPSVHLKDYLTRLAQKVSKKTGALDFFKSLNAGELKKAAPADPSAPLVNAEIARQVEALLTPNTTVIAETGDSWFNAQRMKLPNGARVEYEMQWGHIGWSVPAAFGYAVGAPERRNILMVGDGSFQLTAQEVAQMVRLKLPVIIFLINNYGYTIEVMIHDGPYNNIKNWDYAGLMEVFNGNGGYDSGAGKGLKAKTGGELAEAIKVALANTDGPTLIECFIGREDCTEELVKWGKRVAAANSRKPVNKLL

SEQ ID NO: 53 - protein, 557 aa, Acetobacter pasteurianus
MTYTVGMYLAERLVQIGLKHHFAVGGDYNLVLLDQLLLNKDMKQIYCCNELNCGFSAEGYARSNGAAAAVVTFSVGAISAMNALGGAYAENLPVILISGAPNSNDQGTGHILHHTIGKTDYSYQLEMARQVTCAAESITDAHSAPAKIDHVIRTALRERKPAYLDIACNIASEPCVRPGPVSSLLSEPEIDHTSLKAAVDATVALLKNRPAPVMLLGSKLRAANALAATETLADKLQCAVTIMAAAKGFFPEDHAGFRGLYWGEVSNPGVQELVETSDALLCIAPVFNDYSTVGWSGMPKGPNVILAEPDRVTVDGRAYDGFTLRAFLQALAEKAPARPASAQKSSVPTCSLTATSDEAGLTNDEIVRHINALLTSNTTLVAETGDSWFNAMRMTLAGARVELEMQWGHIGWSVPSAFGNAMGSQDRQHVVMVGDGSFQLTAQEVAQMVRYELPVIIFLINNRGYVIEIAIHDGPYNYIKNWDYAGLMEVFNAGEGHGLGLKATTPKELTEAIARAKANTRGPTLIECQIDRTDCTDMLVQWGRKVASTNARKTTLA

SEQ ID NO: 54 - protein, 528 aa, Pseudomonas putida [sequence omitted]

SEQ ID NO: 55 - protein, 528 aa, Pseudomonas aeruginosa
MKTVHSASYEILRRHGLTTVFGNPGSNELPFLKDFPEDFRYILGLHEGAVVGMADGFALASGRPAFVNLHAAAGTGNGMGALTNAWYSHSPLVITAGQQVRSMIGVEAMLANVDAGQLPKPLVKWSHEPACAQDVPRALSQAIQTASLPPRAPVYLSIPYDDWAQPAPAGVEHLAARQVSGAALPAPALLAELGERLSRSRNPVLVLGPDVDGANANGLAVELAEKLRMPAWVAPSASRCPFPTRHACFRGVLPAAIAGISRLLDGHDLILVVGAPVFRYHQFAPGDYLPAGAELVQVTCDPGEAARAPMGDALVGDIALTLEALLEQVRPSARPLPEALPRPPALAEEGGPLRPETVFDVIDALAPRDAIFVKESTSTVTAFWQRVEMREPGSYFFPAAGGLGFGLPAAVGAQLAQPRRQVIGIIGDGSANYGITALWSAAQYRVPAVFIILKNGTYGALRWFAGVLEVPDAPGLDVPGLDFCAIARGYGVEALHAATREELEGALKHALAADRPVLIEVPTQTIEP

SEQ ID NO: 56 - protein, 526 aa, Pseudomonas stutzeri
MASVHSITYELLRRQGIDTVFGNPGSNELPFLKDFPEDFRYILALQEACVVGIADGYAQASRKPAFINLHSAAGTGNAMGAMSNAWNCHSPLIVTAGQQNRAMIGVEALLTNVDAASLPRPLVKWSYEPASAAEVPHAMSRAIHMASMAPRGPVYLSVPYDDWDKEADPQSHHLYDRSVNSAVRLNDQDLEVLVEALNSASNPAIVLGPDVDSANANADCVTLAERLKAPVWVAPSAPRCPFPTRHPCFRGLMPAGIAAISQLLEGHDVVLVIGAPVFRYHQYDPGQYLKPGTRLISITCDPLEAARAPMGDAIVADIGTMTAALASRIGESERQLPAVLPSPERVNQDAGRLRPETVFDTLNEMAPEDAIYLNESTSTTAQMWQRLNMRNPGSYYFCAAGGLGFALPAAIGVQLAEPDRQVIAVIGDGSANYSISALWTAAHYNIPAIFLIMNNGTYGALRWFAGVLEAENVPGLDVPGIDFCAIAKGYGIPALKADNLEQLKGSIHEALSAKGPVLIEVSTVSL

SEQ ID NO: 57 - protein, 528 aa, Pseudomonas fluorescens
MKTVHSASYDILRQQGLTTVFGNPGSNELPFLKGFPEDFRYILGLHEGAVVGMADGFALASGQPAFVNLHAAAGTGNGMGALTNAWYSHSPLVITAGQQVRSMIGVEAMLANVDAPQLPKPLVKWSAEPACAEDVPRALSQAIHMANQAPKGPVYLSIPYDDWARPAPAGVEHLARRQVATAGLPSAAQLRSLVQRLAAARNPVLVLGPDVDGSRSNHLAVQLAEKLRMPAWVAPSASRCPFPTRHPSFRGVLPAAIAGISRCLADHDLILVVGAPVFRYHQFAPGDYLPAGTELLHITCDPGEAARAPMGDALVGDIVETLQALVWALPDCDRPQPQALPPAAPVEELGGLLRPETVFDVIDELAPKDAIYVKESTSTVGAFWQRVEMREPGSYYFPAAGGLGFGLPAAVGVQLARPERRVIGVIGDGSANYGITALWTAAQYQIPVVFIILKNGTYGALRWFAGVLQVSDAPGLDVPGLDFCAIGRGYGVHSVQANTREAFAQALSEALAGDRPVLIEVPTLTIEP

SEQ ID NO: 58 - protein, 1220 aa, Chloroflexus aurantiacus
MATGESMSGTGRLAGKIALITGGAGNIGSELTRRFLAEGATVIISGRNRAKLTALAEMQAEAGVPAKRIDLEVMDGSDPVAVRAGIEAIVARHGQIDILVNNAGSAGAQRRLAEIPLTEAELGPGAEETLHASIANLLGMGWHLMRIAAPHMPVGSAVINVSTIFSRAEYYGRIPYVTPKAALNALSQLAARELGARGIRVNTIFPGPIESDRIRTVFQRMDQLKGRPEGDTAHHFLNTMRLCRANDQGALERRFPSVGDVADAAVFLASAESAALSGETIEVTHGMELPACSETSLLARTDLRTIDASGRTTLICAGDQIEEVMALTGMLRTCGSEVIIGFRSAAALAQFEQAVNESRRLAGADFTPPIALPLDPRDPATIDAVFDWAGENTGGIHWILPATSHEPAPCVIEVDDERVLNFLADEITGTIVIASRLARYWQSQRLTPGARARGPRVIFLSNGADQNGNVYGRIQSAAIGQLIRVWRHEAELDYQRASAAGDHVLPPVWANQIVRFANRSLEGLEFACAWTAQLLHSQRHINEITLNIPANISATTGARSASVGWAESLIGLHLGKVALITGGSAGIGGQIGRLLALSGARVMLAARDRHKLEQMQAMIQSELAEVGYTDVEDRVHIAPGCDVSSEAQLADLVERTLSAFGTVDYLINNAGIAGVEEMVIDMPVEGWRHTLFANLISNYSLMRKLAPLMKKQGSGYILNVSSYFGGEKDAAIPYPNRADYAVSKAGQRAMAEVFARFLGPEIQINAIAPGPVEGDRLRGTGERPGLFARRARLILENKRLNELHAALIAAARTDERSMHELVELLLPNDVAALEQNPAAPTALRELARRFRSEGDPAASSSSALLNRSIAAKLLARLHNGGYVLPADIFANLPNPPDPFFTRAQIDREARKVRDGIMGMLYLQRMPTEFDVAMATVYYLADRNVSGETFHPSGGLRYERTPTGGELFGLPSPERLAELVGSTVYLIGEHLTEHLNLLAMYLERYGARQVWIVETETGAETMRRLLHDHVEAGRLMTIVAGDQIEAAIDQAITRYGRPGPVVCTPFRPLPTVPLVGRKDSDWSTVLSEAEFAELCEHQLTHHFRVARKIALSDGASLALVTPETTATSTTEQFALANFIKTTLHAFTATIGVESERTAQRILINQVDLTRRARAEEPRDPHERQQELERFIEAVLLVTAPLPPEADTRYAGRIHRGRAITV

SEQ ID NO: 59 - protein, 1229 aa, Roseiflexus castenholzii
MSTVRRLEGKVALITGGAGNIGEVITRRFLAEGATVVITGRNAEKLAVYRRRLIDEERVAPERVVALRMDGSDIAQVRAGVAQIVHGGTDVPIPLHRIDILVNNAGSAGPRRRLVDIPLEPSEVQPPDSETLAQAVGNLVGITWNLTRAAAPHMPSGSSVINISTIFSRTDYYGRIAYVAPKAALNALSDGLARELGVRGIRVNTIYPGPIESERIYTMFQAMDALKGQPEGDTASGFLRMMRLSRIDQNGEVVKRFPSPVDVANTAVFLASDESAAFTGHAFEVTHGMEVPTESRTTFVSRPGLRSVDATGKVILICAGDQVDDAVALADTLRSCRATVVIGFRDPRALEKASVLLREPRHALAADMYGRPTMTAEARLVRLDPLDPRAAAQTLEQIHAELGAIHHAVVLPGQSRHAPSASLIEVDDQVVERFLHQELVGTIALARELARFWEEYPSGSSMHRVLFVSNPDDQQGNQYSHILRAAVEQLVRVWRHESEYDSVNPAHQQEGQSSAAVWANQLIRYVNNEMANLDFTCAWVAKLLGSDRRIAEINLYLPEEIVGTIGVHNPGFGWAESLFGLHMGKVALITGGSAGIGGQIGRLLALSGAHVMLAARNADQLEQMRASIVREVRDASYPDAESRVAIFPGSDVSDIDGLERLVNHTVRVFGKVDYLINNAGIAGAEEMVIDMPVDAWRHTLRANLISNYALLRRLAPQMKAAGGAYVLNVSSYFGGEKYVAIPYPNRSDYAVSKAGQRAMVESLARFLGPEIQINAIAPGPVEGERLKGAGSRPGLFMRRARLILENKRLNEVFAALLAARHEGATIADLLPDLFANDIQSIANSAAMPAPLRRLATMLRETSDAGGSAQSYLMNATIARKLLNRLENGGYITLHDRRALTVEPPEPFFTEAQIEREAIKVRDGILGMLHLQRMPTEFDVALATVFYLADRNVTGETFHPSGGLRFERTVTEGELFGKPGQQRLERLKGSVVYLIGEHLRQHLVLLARTFLDEIHVARVVLLTETTQAATDLAAELSDYEAAGRFVVIPTCGDIEGGIDRAMAEYGRPGPVISTPFRPLPDRALSARNGDWSSVLTTAEFEELVEQQITHHFRVARKAGLIEGANVTLVTPPTSARSTSEEFALANFVKTTLHALTATAGAESERTVPHVPVNQVDLTRRARSEEPRTPSEEEEELQRFVNAVLLTSAPLPTPLESRYRARIYRGNAITV

SEQ ID NO: 60 - protein, 1217 aa, Erythrobacter sp.
MSKEGNAAKGRLEGKVALITGAAGNLGNEISRAFAREGAFVVMTGRTEERISAAREQLIADTGVAPERIDTAVLDGGNPDSIRAAMAKLRKEYGRIDILINNAGSAGPKQPLHNVPLSPQEMEACGDTETVRDAMLNILGVTWNMARIVAPMMPVGGAMVNISTIFSHTRYYGRTAYVVPKAALNALSNQLASELGPRGIRVNTVFPGPIESDRIRTVFAAMDEVQSQPKDTTANYFTGRMALTRSVNGKVDGKPLPNPKDIAGTCLFLASEEAAGIAGEEVDVTHGLSANRTSASTYMTRPSMRSLDGAGLNIFIVSGENWDDALVAAHTLIGSGAKVRLGLARNADVAQANARLKAQGIGEELTVTRFNRAEPDAMEDALAAFSGDVDGAITGAIILPVKPSGHFTGSLLAADDDTVTKFMDTELVGAIAVSRSLARYWHGREDLQSPPRCVFMTNPGDPLGNSFASVLSAGITQLIRIWRDEERVQAGNGSTEHAVWSNQIVRHTNTEDENTRFASGHATRVLFREQHIAEIDLKLPANISEETGSRKAMVGFAENITGLHLGKVAFITGGSAGIGGQVARLLALAGAKVMMVARRESELVAARDRIVGELQDIGFAGVERRVKYMADIDVSDFASLDKAVDATLEEFGRIDYLINNAGVAGAEDMVIDMEPEAWRFTLDANLISNYHLMQRVVPLMKEQGSGYVLNVSSYFGGEKFLAVAYPNRADYGLSKAGQRAMVEAFSPFLGPEVQCNAIAPGPVDGDRLSGTGGKPGLFQRRAKLILENKRLNAVYSAVIHAIREGGDAAKILTRLSRNSTSTLSHDAEAPEELRKLALDFASQGDGLCTWDQYLLTDAMAQRLLVRLQLGGFLLGSNEWASLSSSEQTWLKLSPPDDKPFLPAAQVDKVANGVGKGVISQLHLGAMPTEAEVAQATVFFLADRAVSGETFMPSGGLRVERSNTEREMFGSPKQERIDKMKGKTVWIIGEHLSDYVAATIEELVSGCGVAKVVLIAKDKSGEKAVRDQLPNDLSKDALEVLIAGDGLEEAMDEALGHWGKPTTVLSMPGEPLPDHLFEGGNPLSTKDFAHMVEANITRHYRVTRKASLYDGCQVVLVSPDVPYGSDGPGVALANFVKTSLHAFTATVAVENERLVHDVPVNQINLTRRVSSEEPRDADEHAEELRRFTRAVLLVGAPLPDAQDSRYRSKIYRGTSMTV

SEQ ID NO: 61 - protein, 357 aa, Metallosphaera sedula
MRRTLKAAILGATGLVGIEYVRMLADHPYIKPTYLAGKGSVGKPYGEIVRWQTVGNVPKEVANQEVKPTDPKLMDDVDIIFSPLPQGAAGPVEEQFAKLGFNVISNSPDHRFDMDVPMIIPEVNPHTVTLIDEQRKRRDWKGFIVTTPLCTAQGAAIPLTPIYQNFKMSGVMITTMQSLSGAGYPGIASLDIVDNALPLGDGYDAKTVKEITRILSEVKRNVQEPGVNEITLDATTHRIATIHGHYEVAYVTFKEDTDVRKVMESMESFKGEPQDLKLPTAPEKPIIVTTQDARPQVFFDRWAGNPPGMSVVVGRLKQVNPRTIRFVSLIHNTVRGAAGGGVLTAELLVEKGYIDKR

SEQ ID NO: 62 - protein, 356 aa, Sulfolobus tokodaii
MRRTLKAAILGATGLVGIEYVRMLSNHPYIKPAYLAGKGSVGKPYGEVVRWQTVGQVPKEIADMEIKPTDPKLMDDVDIIFSPLPQGAAGPVEEQFAKEGFPVISNSPDHRFDPDVPLLVPELNPHTISLIDEQRKRREWKGFIVTTPLCTAQGAAIPLGAIFKDYKMDGAFITTIQSLSGAGYPGIPSLDVVDNILPLGDGYDAKTIKEIFRILSEVKRNVDEPKLEDVSLAATTHRIATIHGHYEVLYVSFKEETAAEKVKETLENFRGEPQDLKLPTAPSKPIIVMNEDTRPQVYFDRWAGDIPGMSVVVGRLKQVNKRMIRLVSLIHNTVRGAAGGGILAAELLVEKGYIEK

SEQ ID NO: 63 - protein, 482 aa, Saccharomyces cerevisiae
MSAFVRVVPRISRSSVLTRSLRLQLRCYASYPEHTIIGMPALSPTMTQGNLAAWTKKEGDQLSPGEVIAEIETDKAQMDFEFQEDGYLAKILVPEGTKDIPVNKPIAVYVEDKADVPAFKDFKLEDSGSDSKTSTKAQPAEPQAEKKQEAPAEETKTSAPEAKKSDVAAPQGRIFASPLAKTIALEKGISLKDVHGTGPRGRITKADIESYLEKSSKQSSQTSGAAAATPAAATSSTTAGSAPSPSSTASYEDVPISTMRSIIGERLLQSTQGIPSYIVSSKISISKLLKLRQSLNATANDKYKLSINDLLVKAITVAAKRVPDANAYWLPNENVIRKFKNVDVSVAVATPTGLLTPIVKNCEAKGLSQISNEIKELVKRARINKLAPEEFQGGTICISNMGMNNAVNMFTSIINPPQSTILAIATVERVAVEDAAAENGFSFDNQVTITGTFDHRTIDGAKGAEFMKELKTVIENPLEMLL

SEQ ID NO: 64 - protein, 420 aa, Saccharomyces cerevisiae
MLAASFKRQPSQLVRGLGAVLRTPTRIGHVRTMATLKTTDKKAPEDIEGSDTVQIELPESSFESYMLEPPDLSYETSKATLLQMYKDMVIIRRMEMACDALYKAKKIRGFCHLSVGQEAIAVGIENAITKLDSIITSYRCHGFTFMRGASVKAVLAELMGRRAGVSYGKGGSMHLYAPGFYGGNGIVGAQVPLGAGLAFAHQYKNEDACSFTLYGDGASNQGQVFESFNMAKLWNLPVVFCCENNKYGMGTAASRSSAMTEYFKRGQYIPGLKVNGMDILAVYQASKFAKDWCLSGKGPLVLEYETYRYGGHSMSDPGTTYRTRDEIQHMRSKNDPIAGLKMHLIDLGIATEAEVKAYDKSARKYVDEQVELADAAPPPEAKLSILFEDVYVKGTETPTLRGRIPEDTWDFKKQGFASRD

SEQ ID NO: 65 - protein, 366 aa, Saccharomyces cerevisiae
MFSRLPTSLARNVARRAPTSFVRPSAAAAALRFSSTKTMTVREALNSAMAEELDRDDDVFLIGEEVAQYNGAYKVSKGLLDRFGERRVVDTPITEYGFTGLAVGAALKGLKPIVEFMSFNFSMQAIDHVVNSAAKTHYMSGGTQKCQMVFRGPNGAAVGVGAQHSQDFSPWYGSIPGLKVLVPYSAEDARGLLKAAIRDPNPVVFLENELLYGESFEISEEALSPEFTLPYKAKIEREGTDISIVTYTRNVQFSLEAAEILQKKYGVSAEVINLRSIRPLDTEAIIKTVKKTNHLITVESTFPSFGVGAEIVAQVMESEAFDYLDAPIQRVTGADVPTPYAKELEDFAFPDTPTIVKAVKEVLSIE

SEQ ID NO: 66 - protein, 499 aa, Saccharomyces cerevisiae
MLRIRSLLNNKRAFSSTVRTLTINKSHDVVIIGGGPAGYVAAIKAAQLGFNTACVEKRGKLGGTCLNVGCIPSKALLNNSHLFHQMHTEAQKRGIDVNGDIKINVANFQKAKDDAVKQLTGGIELLFKKNKVTYYKGNGSFEDETKIRVTPVDGLEGTVKEDHILDVKNIIVATGSEVTPFPGIEIDEEKIVSSTGALSLKEIPKRLTIIGGGIIGLEMGSVYSRLGSKVTVVEFQPQIGASMDGEVAKATQKFLKKQGLDFKLSTKVISAKRNDDKNVVEIVVEDTKTNKQENLEAEVLLVAVGRRPYIAGLGAEKIGLEVDKRGRLVIDDQFNSKFPHIKVVGDVTFGPMLAHKAEEEGIAAVEMLKTGHGHVNYNNIPSVMYSHPEVAWVGKTEEQLKEAGIDYKIGKFPFAANSRAKTNQDTEGFVKILIDSKTERILGAHIIGPNAGEMIAEAGLALEYGASAEDVARVCHAHPTLSEAFKEANMAAYDKAIHC

SEQ ID NO: 67 - protein, 887 aa, Escherichia coli
MSERFPNDVDPIETRDWLQAIESVIREEGVERAQYLIDQLLAEARKGGVNVAAGTGISNYINTIPVEEQPEYPGNLELERRIRSAIRWNAIMTVLRASKKDLELGGHMASFQSSATIYDVCFNHFFRARNEQDGGDLVYFQGHISPGVYARAFLEGRLTQEQLDNFRQEVHGNGLSSYPHPKLMPEFWQFPTVSMGLGPIGAIYQAKFLKYLEHRGLKDTSKQTVYAFLGDGEMDEPESKGAITIATREKLDNLVFVINCNLQRLDGPVTGNGKIINELEGIFEGAGWNVIKVMWGSRWDELLRKDTSGKLIQLMNETVDGDYQTFKSKDGAYVREHFFGKYPETAALVADWTDEQIWALNRGGHDPKKIYAAFKKAQETKGKATVILAHTIKGYGMGDAAEGKNIAHQVKKMNMDGVRHIRDRFNVPVSDADIEKLPYITFPEGSEEHTYLHAQRQKLHGYLPSRQPNFTEKLELPSLQDFGALLEEQSKEISTTIAFVRALNVMLKNKSIKDRLVPIIADEARTFGMEGLFRQIGIYSPNGQQYTPQDREQVAYYKEDEKGQILQEGINELGAGCSWLAAATSYSTNNLPMIPFYIYYSMFGFQRIGDLCWAAGDQQARGFLIGGTSGRTTLNGEGLQHEDGHSHIQSLTIPNCISYDPAYAYEVAVIMHDGLERMYGEKQENVYYYITTLNENYHMPAMPEGAEEGIRKGIYKLETIEGSKGKVQLLGSGSILRHVREAAEILAKDYGVGSDVYSVTSFTELARDGQDCERWNMLHPLETPRVPYIAQVMNDAPAVASTDYMKLFAEQVRTYVPADDYRVLGTDGFGRSDSRENLRHHFEVDASYVVVAALGELAKRGEIDKKVVADAIAKFNIDADKVNPRLA

SEQ ID NO: 68 - protein, 630 aa, Escherichia coli
MAIEIKVPDIGADEVEITEILVKVGDKVEAEQSLITVEGDKASMEVPSPQAGIVKEIKVSVGDKTQTGALIMIFDSADGAADAAPAQAEEKKEAAPAAAPAAAAAKDVNVPDIGSDEVEVTEILVKVGDKVEAEQSLITVEGDKASMEVPAPFAGTVKEIKVNVGDKVSTGSLIMVFEVAGEAGAAAPAAKQEAAPAAAPAPAAGVKEVNVPDIGGDEVEVTEVMVKVGDKVAAEQSLITVEGDKASMEVPAPFAGVVKELKVNVGDKVKTGSLIMIFEVEGAAPAAAPAKQEAAAPAPAAKAEAPAAAPAAKAEGKSEFAENDAYVHATPLIRRLAREFGVNLAKVKGTGRKGRILREDVQAYVKEAIKRAEAAPAATGGGIPGMLPWPKVDFSKFGEIEEVELGRIQKISGANLSRNWVMIPHVTHFDKTDITELEAFRKQQNEEAAKRKLDVKITPVVFIMKAVAAALEQMPRFNSSLSEDGQRLTLKKYINIGVAVDTPNGLVVPVFKDVNKKGIIELSRELMTISKKARDGKLTAGEMQGGCFTISSIGGLGTTHFAPIVNAPEVAILGVSKSAMEPVWNGKEFVPRLMLPISLSFDHRVIDGADGARFITIINNTLSDIRRLVM

SEQ ID NO: 69 - protein, 474 aa, Escherichia coli [sequence omitted]

SEQ ID NO: 70 - protein, 371 aa, Bacillus subtilis
MAAKTKKAIVDSKKQFDAIKKQFETFQILNEKGEVVNEAAMPDLTDDQLKELMRRMVFTRVLDQRSISLNRQGRLGFYAPTAGQEASQIATHFALEKEDFVLPGYRDVPQLIWHGLPLYQAFLFSRGHFRGNQMPDDVNALSPQIIIGAQYIQTAGVALGLKKRGKKAVAITYTGDGGASQGDFYEGINFAGAYKAPAIFVVQNNRYAISTPVEKQSAAETIAQKAVAAGIVGVQVDGMDPLAVYAATAEARERAINGEGPTLIETLTFRYGPHTMAGDDPTKYRTKEIENEWEQKDPLVRFRAFLENKGLWSEEEEAKVIEDAKEEIKQAIKKADAEPKQKVTDLMKIMYEKMPHNLEEQFEIYTQKESK

SEQ ID NO: 71 - protein, 325 aa, Bacillus subtilis
MAQMTMIQAITDALRTELKNDENVLVFGEDVGVNGGVFRATEGLQKEFGEDRVFDTPLAESGIGGLALGLGLNGFRPVMEIQFFGFVYEVMDSVSGQMARMRYRSGGRWTSPVTIRSPFGGGVHTPELHADSLEGLVAQQPGIKVVIPSTPYDAKGLLISAIRDNDPVVFLEHMKLYRSFRQEVPEEEYTIELGKADVKREGTDLSIITYGAMVHESLKAADELEKDGISAEVVDLRTVSPLDIDTIIASVEKTGRAIVVQEAQKQAGIAANVVAEINDRAILSLEAPVLRVAAPDTVFPFSQAESVWLPNHKDVLETARKVLEF

SEQ ID NO: 72 - protein, 442 aa, Bacillus subtilis
MAFEFKLPDIGEGIHEGEIVKWFVKPNDEVDEDDVLAEVQNDKAVVEIPSPVKGKVLELKVEEGTVATVGQTIITFDAPGYEDLQFKGSDESDDAKTEAQVQSTAEAGQDVAKEEQAQEPAKATGAGQQDQAEVDPNKRVIAMPSVRKYAREKGVDIRKVTGSGNNGRVVKEDIDSFVNGGAQEAAPQETAAPQETAAKPAAAPAPEGEFPETREKMSGIRKAIAKAMVNSKHTAPHVTLMDEVDVTNLVAHRKQFKQVAADQGIKLTYLPYVVKALTSALKKFPVLNTSIDDKTDEVIQKHYFNIGIAADTEKGLLVPVVKNADRKSVFEISDEINGLATKAREGKLAPAEMKGASCTITNIGSAGGQWFTPVINHPEVAILGIGRIAEKAIVRDGEIVAAPVLALSLSFDHRMIDGATAQNALNHIKRLLNDPQLILMEA

SEQ ID NO: 73 - protein, 470 aa, Bacillus subtilis
MVVGDFPIETDTLVIGAGPGGYVAAIRAAQLGQKVTVVEKATLGGVCLNVGCIPSKALINAGHRYENAKHSDDMGITAENVTVDFTKVQEWKASVVNKLTGGVAGLLKGNKVDVVKGEAYFVDSNSVRVMDENSAQTYTFKNAIIATGSRPIELPNFKYSERVLNSTGALALKEIPKKLVVIGGGYIGTELGTAYANFGTELVILEGGDEILPGFEKQMSSLVTRRLKKKGNVEIHTNAMAKGVEERPDGVTVTFEVKGEEKTVDADYVLITVGRRPNTDELGLEQVGIEMTDRGIVKTDKQCRTNVPNIYAIGDIIEGPPLAHKASYEGKIAAEAIAGEPAEIDYLGIPAVVFSEPELASVGYTEAQAKEEGLDIVAAKFPFAANGRALSLNETDGFMKLITRKEDGLVIGAQIAGASASDMISELSLAIEGGMTAEDIAMTIHAHPTLGEITMEAAEVAIGSPIHIVK

SEQ ID NO: 74 - protein, 2123 aa, Saccharomyces cerevisiae
MRSIRKWAYETFNDEKIIQFVVMATPDDLHANSEYIRMADQYVQVPGGTNNNNYANIDLILDVAEQTDVDAVWAGWGHASENPCLPELLASSQRKILFIGPPGRAMRSLGDKISSTIVAQSAKIPCIPWSGSHIDTIHIDNKTNFVSVPDDVYVRGCCSSPEDALEKAKLIGFPVMIKASEGGGGKGIRRVDNEDDFIALYRQAVNETPGSPMFVMKVVTDARHLEVQLLADQYGTNITLFGRDCSIQRRHQKIIEEAPVTITKPETFQRMERAAIRLGELVGYVSAGTVEYLYSPKDDKFYFLELNPRLQVEHPTTEMISGVNLPATQLQIAMGIPMHMISDIRKLYGLDPTGTSYIDFKNLKRPSPKGHCISCRITSEDPNEGFKPSTGKIHELNFRSSSNVWGYFSVGNNGAIHSFSDSQFGHIFAVGNDRQDAKQNMVLALKDFSIRGEFKTPIEYLIELLETRDFESNNISTGWLDDLILKNLSSDSKLDPTLAIICGAAMKAYVFTEKVRNKYLELLRRGQVPPKDFLKTKFPVDFIFDNNRYLFNVAQSSEEQFILSINKSQCEVNVQKLSSDCLLISVDGKCHTVYWKDDIRGTRLSIDSNTIFLEAELNPTQVISPTPGKLVKYLVRSGDHVFAGQQYAEIEIMKMQMPLVAKSDGVIELLRQPGSIIEAGDVIAKLTLDSPSKANESSLYRGELPVLGPPLIEGSRPNHKLRVLINRLENILNGYHENSGIETTLKELIKILRDGRLPYSEWDSQISTVRNRLPRQLNEGLGNLVKKSVSFPAKELHKLMKRYLEENTNDHVVYVALQPLLKISERYSEGLANHECEIFLKLIKKYYAVEKIFENHDIHEERNLLNLRRKDLTNLKKILCISLSHANVVAKNKLVTAILHEYEPLCQDSSKMSLKFRAVIHDLASLESKWAKEVAVKARSVLLRGIFPPIKKRKEHIKTLLQLHIKDTGAENIHSRNIYSCMRDFGNLIHSNLIQLQDLFFFFGHQDTALSSIASEIYARYAYGNYQLKSIKIHKGAPDLLMSWQFSSLRNYLVNSDGESDEFTKLSKPPSTSGKSSANSFGLLVNMRALESLEKTLDEVYEQIHIPEERLSSGENSLIVNILSPIRYRSENDLIKTLKIKLHENERGLSKLKVNRITFAFIAANAPAVKFYSFDGTTYDEISQIRNMDPSYEAPLELGKMSNYKIRSLPTYDSSIRIFEGISKFTPLDKRFFVRKIINSFMYNDQKTTEENLKAEINAQVVYMLEHLGAVDISNSDLNHIFLSFNTVLNIPVHRLEEIVSTILKTHETRLFQERITDVEICISVECLETKKPAPLRLLISNKSGYVVKIETYYEKIGKNGNLILEPCSEQSHYSQKSLSLPYSVKDWLQPKRYKAQFMGTTYVYDFPGLFHQAAIQQWKRYFPKHKLNDSFFSWVELIEQNGNLIKVNREPGLNNIGMVAFEIMVQTPEYPEGRNMIVISNDITYNIGSFGPREDLFFDRVTNYARERGIPRIYLAANSGAKLGIAEELIPLFRVAWNDPSDPTKGFQYLYLAPKDMQLLKDSGKGNSVVVEHKMVYGEERYIIKAIVGFEEGLGVECLQGSGLIAGATSKAYRDIFTITAVTCRSVGIGSYLVRLGQRTIQVEDKPIILTGASAINKVLGTDIYTSNLQIGGTQIMYKNGIAHLTASNDMKAIEKIMTWLSYVPAKRDMSPPLLETMDRWDRDVDFKPAKQVPYEARWLIEGKWDSNNNFQSGLFDKDSFFETLSGWAKGVIVGRARLGGIPVGVIAVETKTIEEIIPADPANLDSSEFSVKEAGQVWYPNSAFKTAQTINDFNYGEQLPLIILANWRGFSGGQRDMYNEVLKYGSFIVDALVDYKQPILIYIPPFGELRGGSWVVIDPTINPEQMEMYADVESRGGVLEPDGVVSIKYRKEKMIETMIRLDSTYGHLRRTLTEKKLSLEKQNDLTKRLKIRERQLIPIYNQISIQFADLHDRSTRMLVKGVIRNELEWKKSRRFLYWRLRRRLNEGQVIKRLQKKTCDNKTKMKYDDLLKIVQSWYNDLDVNDDRAVVEFIERNSKKIDKNIEEFEISLLIDELKKKFEDRRGNIVLEELTRLVDSKRKR

SEQ ID NO: 75 - protein, 319 aa, Escherichia coli
MSLNFLDFEQPIAELEAKIDSLTAVSRQDEKLDINIDEEVHRLREKSVELTRKIFADLGAWQIAQLARHPQRPYTLDYVRLAFDEFDELAGDRAYADDKAIVGGIARLDGRPVMIIGHQKGRETKEKIRRNFGMPAPEGYRKALRLMQMAERFKMPIITFIDTPGAYPGVGAEERGQSEAIARNLREMSRLGVPVVCTVIGEGGSGGALAIGVGDKVNMLQYSTYSVISPEGCASILWKSADKAPLAAEAMGIIAPRLKELKLIDSIIPEPLGGAHRNPEAMAASLKAQLLADLADLDVLSTEDLKNRRYQRLMSYGYA

SEQ ID NO: 76 - protein, 156 aa, Escherichia coli
MDIRKIKKLIELVEESGISELEISEGEESVRISRAAPAASFPVMQQAYAAPMMQQPAQSNAAAPATVPSMEAPAAAEISGHIVRSPMVGTFYRTPSPDAKAFIEVGQKVNVGDTLCIVEAMKMMNQIEADKSGTVKAILVESGQPVEFDEPLVVIE

SEQ ID NO: 77 - protein, 449 aa, Escherichia coli
MLDKIVIANRGEIALRILRACKELGIKTVAVHSSADRDLKHVLLADETVCIGPAPSVKSYLNIPAIISAAEITGAVAIHPGYGFLSENANFAEQVERSGFIFIGPKAETIRLMGDKVSAIAAMKKAGVPCVPGSDGPLGDDMDKNRAIAKRIGYPVIIKASGGGGGRGMRVVRGDAELAQSISMTRAEAKAAFSNDMVYMEKYLENPRHVEIQVLADGQGNAIYLAERDCSMQRRHQKVVEEAPAPGITPELRRYIGERCAKACVDIGYRGAGTFEFLFENGEFYFIEMNTRIQVEHPVTEMITGVDLIKEQLRIAAGQPLSIKQEEVHVRGHAVECRINAEDPNTFLPSPGKITRFHAPGGFGVRWESHIYAGYTVPPYYDSMIGKLICYGENRDVAIARMKNALQELIIDGIKTNVDLQIRIMNDENFQHGGTNIHYLEKKLGLQEK

SEQ ID NO: 78 - protein, 304 aa, Escherichia coli
MSWIERIKSNITPTRKASIPEGVWTKCDSCGQVLYRAELERNLEVCPKCDHHMRMTARNRLHSLLDEGSLVELGSELEPKDVLKFRDSKKYKDRLASAQKETGEKDALVVMKGTLYGMPVVAAAFEFAFMGGSMGSVVGARFVRAVEQALEDNCPLICFSASGGARMQEALMSLMQMAKTSAALAKMQERGLPYISVLTDPTMGGVSASFAMLGDLNIAEPKALIGFAGPRVIEQTVREKLPPGFQRSEFLIEKGAIDMIVRRPEMRLKLASILAKLMNLPAPNPEAPREGVVVPPVPDQEPEA

SEQ ID NO: 79 - protein, 282 aa, Chloroflexus aurantiacus
MEETAIPQSLTPWDRVQLARHPQRPHTLDYIAALCEDFVELHGDRRFGDDPAMVGGMATFAGQTVMVIGHQKGNDTRENMRRNFGMPHPEGYRKAQRLMRHAEKFGLPVICFVDTPAADPTKSSEERGQANAIAESIMLMTTLRVPSIAVVIGEGGSGGALAISVADRILMQENAIYSVAPPEAAASILWRDAAKAPEAARALKLTAADLYDLRIIDEVIPEPPGGAHADRLTAITTVGERLRVHLADLQQRDIDTLLRERYRKYRSMGQYQEQQMDFFGRM

SEQ ID NO: 80 - protein, 180 aa, Chloroflexus aurantiacus
MMLWGAMKDETTELPADQPDPFGLAAVRVLLQMLEQSDVYEITIENGNAKLHVKRGQPGGVIYSAPLPTAPVPSPSLPATPVTPFVQPPPAPEGPPVEMPAGHTITAPMVGTFYAAPSPRDRPFVQEGDEVRVGDTVGIVEAMKMMNEIESDVAGRVARILVKNGQPVEYGQPLMVIEPL

SEQ ID NO: 81 - protein, 455 aa, Chloroflexus aurantiacus
MIRKVLVANRGEIAVRIIRACQELGIRTVVAYSTADRDSLAVRLADEAVCIGPPPAAKSYLNAPALISAALVSGCDAIHPGYGFLSENPYFAEMCADCKLTFIGPPPEPIRLMGDKAIGRETMRKAGVPTVPGSDGEVRSLEEAIDVARQIGYPVLLKPSGGGGGRGMRVAYDEADLQRAFPTARAEAEAAFGNGALLLEKYLTRVRHVEIQVLADQYGHAIHLGERDCSAQRRHQKIVEEAPSPAVTPELRERMGADAVRGIKSIGYVNAGTLEFLLDQDGNYYFIEMNTRIQVEHPVTEQVTGIDLVRWQLLIASGERLTLRQEDIKITRHAIECRINAEDPERDFLPASGEVEFYLPPGGPGVRVDSHLYSGYTPPGTYDSLLAKIITFGDTRDEALNRMRRALNECVITGIKTTIPFQLALIDDPEFRAGRIHTGYVAELLRQWKETLNPV

SEQ ID NO: 82 - protein, 305 aa, Chloroflexus aurantiacus
MKEFFRLSRKGFTGREDQDSAQIPDDLWVKCSSCRELIYKKQLNDNLKVCPKCGHHMRLSAHEWLGLLDVGSFREMDANLLPTDPLGFVTDEESYAAKLAKTQQRTGMADAVIAGIGAISNMQICVAVADFSFMGASMGSVYGEKMARSAERAAELGVPLLTINTSGGARQQEGVIGLMQMAKVTMALTRLADAGQPHIALLVDPCYGGVTASYPSVADIIIAEPGANIGFAGKRLIEQIMRQKLPAGFQTAEFMLEHGMIDMVVPRSEMRDTLARILRLYRQRSTSPAKAELAGRRATLPQPIM

SEQ ID NO: 83 - protein, 378 aa, Bacillus subtilis
MIIGVPKEIKNNENRVALTPGGVSQLISNGHRVLVETGAGLGSGFENEAYESAGAEIIADPKQVWDAEMVMKVKEPLPEEYVYFRKGLVLFTYLHLAAEPELAQALKDKGVTAIAYETVSEGRTLPLLTPMSEVAGRMAAQIGAQFLEKPKGGKGILLAGVPGVSRGKVTIIGGGVVGTNAAKMAVGLGADVTIIDLNADRLRQLDDIFGHQIKTLISNPVNIADAVAEADLLICAVLIPGAKAPTLVTEEMVKQMKPGSVIVDVAIDQGGIVETVDHITTHDQPTYEKHGVVHYAVANMPGAVPRTSTIALTNVTVPYALQIANKGAVKALADNTALRAGLNTANGHVTYEAVARDLGYEYVPAEKALQDESSVAGA

SEQ ID NO: 84 - protein, 505 aa, Schizosaccharomyces pombe
MFTDYPNDINCESPRMSDLDGFCQNAFSDLNSLNQQVFKANYAVRGALAILADEIQDDLLENPSSYPFSEIVYANIGNPQQMGQSPITFVRQVLSLCQYPTLLDHAEEKWFQNLFPTDVVQRSKMLLKESGSLGAYSASQGIPLVRRHVADFIRARDGFDCEPSDIYLTSGASHAARLIMTLIIARPTDGVMVPAPQYPLYGAQIDLMSGSMVSYSLSEENNWDIDFDQFKKSFDEASKKGINVRLCVVINPGNPTGACISENSMEKVLRFAKAKGIVLLADEVYQNNIYQNKFHSFRRKLGELREKEPDNHWDQVSLISVNSVSKGQFGECGQRGGYLDVVNIPEPAKDQILKLATIDICPPVAGQLLVDMLVNPPKPGDPSYDLFIKEVDEIHEALRLQCRQLYEGTKRMKRVSCLEPHGAMYLHPSVSLPEKLITTAKAQKIQPDEFYAIELLKRSGICVVPGSGFGQPEGDYHIRITFLAKGTEYIERFVKAHNEIMDLYE

SEQ ID NO: 85 - protein, 507 aa, Saccharomyces cerevisiae
MTMTHQQDLKGVFTAKDLDFKPAGKITKKDLNTGVTKAEYAVRGAIPTRADELKEELKKNPEVLPFDDIINANIGNPQQLDQKPLTFTRQVLAILEYPEILRVGHNELASLNLFSRDALERAERLLNDIGGSIGAYSHSQGVPGIRQTVADFITRRDGGEPATPEDIYLTTGASSAATSLLSLLCKDSQTGLLIPIPQYPLYTASASLFNAQVLPYYLDEESNWSTNSDEIEKVVQDALKKQIRPSVLIVINPGNPTGAVLSEETIARICLIAAKYGITIISDEVYQENIFNDVKFHSMKKVLRKLQHLYPGKFDNVQLASLHSISKGFMDECGQRGGYMEIIGFSQEIRDALFKLMSISICSVVTGQAVVDLMVKPPQPGDESYEQDHDERLKIFHEMRTRANLLYETFKELEGIECQKPQGAMYLFPRLVLPKKALCESERLGIEPDEFYCTSLLESTGICTVPGSGFGQRPGTYHVRTTFLAPGTKWIQDWKEFHQDFFSKYRN

SEQ ID NO: 86 - protein, 471 aa, Bacillus subtilis
MKNKWYKPKRHWKEIELWKDVPEEKWNDWLWQLTHTVRTLDDLKKVINLTEDEEEGVRISTKTIPLNITPYYASLMDPDNPRCPVRMQSVPLSEEMHKTKYDLEDPLHEDEDSPVPGLTHRYPDRVLFLVTNQCSMYCRYCTRRRFSGQIGMGVPKKQLDAAIAYIRETPEIRDCLISGGDGLLINDQILEYILKELRSIPHLEVIRIGTRAPVVFPQRITDHLCEILKKYHPVWLNTHFNTSIEMTEESVEACEKLVNAGVPVGNQAVVLAGINDSVPIMKKLMHDLVKIRVRPYYIYQCDLSEGIGHFRAPVSKGLEIIEGLRGHTSGYAVPTFVVDAPGGGGKIALQPNYVLSQSPDKVILRNFEGVITSYPEPENYIPNQADAYFESVFPETADKKEPIGLSAIFADKEVSFTPENVDRIKRREAYIANPEHETLKDRREKRDQLKEKKFLAQQKKQKETECGGDSS

SEQ ID NO: 87 - protein, 416 aa, Porphyromonas gingivalis
MAESRRKYYFPDVTDEQWNDWHWQVLNRIETLDQLKKYVTLTAEEEEGVKESLKVLRMAITPYYLSLIDPENPNCPIRKQAIPTHQELVRAPEDQVDPLSEDEDSPVPGLTHRYPDRVLFLITDKCSMYCRHCTRRRFAGQKDASSPSERIDRCIDYIANTPTVRDVLLSGGDALLVSDERLEYILKRLREIPHVEIVRIGSRTPVVLPQRITPQLVDMLKKYHPVWLNTHFNHPNEVTEEAVEACERMANAGIPLGNQTVLLRGINDCTHVMKRLVHLLVKMRVRPYYIYVCDLSLGIGHFRTPVSKGIEIIENLRGHTSGYAVPTFVVDAPGGGGKIPVMPNYVVSQSPRHVVLRNYEGVITTYTEPENYHEECDCEDCRAGKHKEGVAALSGGQQLAIEPSDLARKKRKFDKN

SEQ ID NO: 88 - protein, 425 aa, Fusobacterium nucleatum
MNTVNTRKKFFPNVTDEEWNDWTWQVKNRIEKIDDLKKYVELSAEEEEGVVRTLETLRMAITPYYFSLIDMNSDRCPIRKQAIPTIQEIHQSDADLLDPLHEDEDSPVPGLTHRYPDRVLLLITDMCSMYCRHCTRRRFAGSSDDAMPMDRIDKAIEYIAKTPQVRDVLLSGGDALLVSDKKLESIIQKLRAIPHVEIIRIGSRTPVVLPQRITPELCNMLKKYHPIWLNTHFNHPQEVTPEAKKACEMLADAGVPLGNQTVLLRGINDSVPVMKRLVHDLVMMRVRPYYIYQCDLSMGLEHFRTPVSKGIEIIEGLRGHTSGYAVPTFVVDAPGGGGKTPVMPQYVISQSPHRVVLRNFEGVITTYTEPENYTHEPCYDEEKFEKMYEISGVYMLDEGLKMSLEPSHLARHERNKKRAEAEGKK

SEQ ID NO: 89 - protein, 517 aa, Megasphaera elsdenii
MRKVEIITAEQAAQLVKDNDTITSIGFVSSAHPEALTKALEKRFLDTNTPQNLTYIYAGSQGKRDGRAAEHLAHTGLLKRAIIGHWQTVPAIGKLAVENKIEAYNFSQGTLVHWFRALAGHKLGVFTDIGLETFLDPRQLGGKLNDVTKEDLVKLIEVDGHEQLFYPTFPVNVAFLRGTYADESGNITMDEEIGPFESTSVAQAVHNCGGKVVVQVKDVVAHGSLDPRMVKIPGIYVDYVVVAAPEDHQQTYDCEYDPSLSGEHRAPEGATDAALPMSAKKIIGRRGALELTENAVVNLGVGAPEYVASVAGEEGIADTITLTVEGGAIGGVPQGGARFGSSRNADAIIDHTYQFDFYDGGGLDIAYLGLAQCDGSGNINVSKFGTNVAGCGGFPNISQQTPNVYFCGTFTAGGLKIAVEDGKVKILQEGKAKKFIKAVDQITFNGSYAARNGKHVLYITERCVFELTKEGLKLIEVAPGIDIEKDILAHMDFKPIIDNPKLMDARLFQDGPMGLKK

SEQ ID NO: 90 - protein, 145 aa, Clostridium propionicum
MVGKKVVHHLMMSAKDAHYTGNLVNGARIVNQWGDVGTELMVYVDGDISLFLGYKDIEFTAPVYVGDFMEYHGWIEKVGNQSYTCKFEAWKVATMVDITNPQDTRATACEPPVLCGRATGSLFIAKKDQRGPQESSFKERKHPGE

SEQ ID NO: 91 - protein, 260 aa, Phytophthora sojae
MAAEYESILTEVRGKVAIITLNRPKALNALCSPLIEELNGAAHAFDADPSIGAIVITGSGSKAFAAGADIKEMATKTFVDAYKSNMFANWGDITKVSKPVIAAVNGYALGGGCELAMLCDLIIAGDSAKFGQPEITLGTIPGCGGTQRLIRAVGKSKAMEMILTGNMIDAQQAERDGLVARVVPADQLLDEALKTANKIASFSQPVVKMAKEAVNAAYEQSLQEGLKYESRLFWSSFATKDQKEGMAAFVEKRKADFKDE

SEQ ID NO: 92 - protein, 258 aa, Chloroflexus aurantiacus
MSEESLVLSTIEGPIAILTLNRPQALNALSPALIDDLIRHLEACDADDTIRVIIITGAGRAFAAGADIKAMANATPIDMLTSGMIARWARIAAVRKPVIAAVNGYALGGGCELAMMCDIIIASENAQFGQPEINLGIIPGAGGTQRLTRALGPYRAMELILTGATISAQEALAHGLVCRVCPPESLLDEARRIAQTIATKSPLAVQLAKEAVRMAAETTVREGLAIELRNFYLLFASADQKEGMQAFIEKRAPNFSGR

SEQ ID NO: 93 - protein, 288 aa, Rhodospirillum rubrum
MAAAPGPPAARPRAARQSRMILPPLREQAQMAYENILVETNGKVGIVTLNRPKALNALSAGLVRDLGAALDAFEADVNVHVIVLTGSDKAFAAGADIKEMAEKSYMDAYLEDFITKGWERVTTCRKPIIAAVAGFALGGGCEMAMMCDFIIAAQNAKFGQPEINLGTLPGAGGTQRLTRFVGKSKAMDMCLTGRMMDADEAWKCGLVSRIVPVDDLKDEVLKIAEAIADKSLPITMMVKEAVNAAYETTLAQGVRFERRLFQASFATDDQKEGMNAFIEKRQPSFTDR

SEQ ID NO: 94 - protein, 258 aa, Rhodobacter capsulatus
MSYQTLIVEIADGVALIRLNRPEALNALNSQLLGELAAALSTLDADPAVRCFVLTGSDKAFAAGADIKEMADKSFVDMLKLDFFGTEGDAILRTRKPVIAAVAGYALGGGCELAMMCDFILCAENAKFGQPEINLGVVAGIGGTQRLTRFVGKSKSMEMHLTGRFMDAAEAERSGLVSRVLPLADLLPEALATARKIAEKSAIATMVAKDCVNRAYETTLREGVLYERRVFHALFATEDQKEGMAAFAEKRPAKFADK

SEQ ID NO: 95 - protein, 290 aa, Homo sapiens
MAALRVLLSCARGPLRPPVRCPAWRPFASGANFEYIIAEKRGKNNTVGLIQLNRPKALNALCDGLIDELNQALKIFEEDPAVGAIVLTGGDKAFAAGADIKEMQNLSFQDCYSSKFLKHWDHLTQVKKPVIAAVNGYAFGGGCELAMMCDIIYAGEKAQFAQPEILIGTIPGAGGTQRLTRAVGKSLAMEMVLTGDRISAQDAKQAGLVSKICPVETLVEEAIQCAEKIASNSKIVVAMAKESVNAAFEMTLTEGSKLEKKLFYSTFATDDRKEGMTAFVEKRKANFKDQ

SEQ ID NO: 96 - protein, 399 aa, Pseudomonas fluorescens
MRVVLCKFALLRSHDGSSANILIKNNKSRELSMTAQVSTEASHAAILQDEVLAEVRNHIGHLTLNRPAGLNALTLQMVRSLTSQLQAWSDDPQVYAVVLRGAGEKAFCAGGDIRSLYDSFKNGDTLHQDFFVEEYALDLAIHHYRKPVLALMDGFVLGGGMGLVQGADLRVVTERSRLAMPEVAIGYFPDVGGSYFLPRIPGELGIYLGVTGVQIRAADALYCGLADWYLDSHKLADLDQKLDNLRWHDSPLKDLQGALARLAVQQLPDAPLAALRPAIDHFFALPDVPSIVEQLQQVTVADSHEWALNTVSLMQTRSPLAMAVTLEMLRRGRRLSLEQCFALELHLDRQWFERGDLIEGVRALIIDKDKSPRWNPPTLHGLALNHVESFFHHFEKVVK

SEQ ID NO: 97 - protein, 351 aa, Bacillus cereus
MTEQVLFSVSENGVATITLNRPKALNSLSYDMLQPIGQKLKEWEHDERIALIVLKGAGTKGFCAGGDIKTLYEARSNEVALQHAERFFEEEYEIDTYIYQYTKPIIACLDGIVMGGGVGLTNGAKYRIVTERTKWAMPEMNIGFFPDVGAAYFLNKAPGYTGRFVALTASILKASDVLFINAADYFMTSDSLPEFLTELESVNWHKEDDVHTNLKEVIRTFATAPNLESELAPSLEVINSHFAFDTIEEIIHSLEKDESSFALKTKEILLSKSPISLKVTLKQFIDGQDKSVEECFATDLILAKNFMRHEDFFEGVRSVVVDKDQNPNYKYKQLSDVSEEDVNRFFNLLNA

SEQ ID NO: 98 - protein, 381 aa, Homo sapiens
MWRLMSRFNAFKRTNTILHHLRMSKHTDAAEEVLLEKKGCAGVITLNRPKFLNALTLNMIRQIYPQLKKWEQDPETFVIIIKGAGGKAFCAGGDIRVISEAEKAKQKIAPVFFREEYMLNNAVGSCQKPYVALIHGITMGGGVGLSVHGQFRVATEKCLFAMPETAIGLFPDVGGGYFFATTPRKTWLLPCINGFRLKGRDVYRAGIATHFVDSEKLAMLEEDLLALKSPSKENIASVLENYHTESKIDRDKSFILEEHMDKINSCFSANTVEEIIENLQQDGSSFALEQLKVINKMSPTSLKITLRQLMEGSSKTLQEVLTMEYRLSQACMRGHDFHEGVRAVLIDKDQSPKWKPADLKEVTEEDLNNHFKSLGSSDLKF

SEQ ID NO: 99 - protein, 261 aa, Megasphaera elsdenii
VKTVYTLGIDVGSSSSKAVILEDGKKIVAHAVVEIGTGSTGPERVLDEVFKDTNLKIEDMANIIATGYGRFNVDCAKGEVSEITCHAKGALFECPGTTTILDIGGQDVKSIKLNGQGLVMQFAMNDKCAAGTGRFLDVMSKVLEIPMSEMGDWYFKSKHPAAVSSTCTVFAESEVISLLSKNVPKEDIVAGVHQSIAAKACALVRRVGVGEDLTMTGGGSRDPGVVDAVSKELGIPVRVALHPQAVGALGAALIAYDKIKK

SEQ ID NO: 100 - protein, 428 aa, Megasphaera elsdenii
MSEEKTVDIESMSSKEALGYFLPKVDEDARKAKKEGRLVCWSASVAPPEFCTAMDIAIVYPETHAAGIGARHGAPAMLEVAENKGYNQDICSYCRVNMGYMELLKQQALTGETPEVLKNSPASPIPLPDVVLTCNNICNTLLKWYENLAKELNVPLINIDVPFNHEFPVTKHAKQYIVGEFKHAIKQLEDLCGRPFDYDKFFEVQKQTQRSIAAWNKIATYFQYKPSPLNGFDLFNYMGLAVAARSLNYSEITFNKFLKELDEKVANKKWAFGENEKSRVTWEGIAVWIALGHTFKELKGQGALMTGSAYPGMWDVSYEPGDLESMAEAYSRTYINCCLEQRGAVLEKVVRDGKCDGLIMHQNRSCKNMSLLNNEGGQRIQKNLGVPYVIFDGDQTDARNFSEAQFDTRVEALAEMMADKKANEGGNH

SEQ ID NO: 101 - protein, 372 aa, Megasphaera elsdenii
MSQIDELISKLQEVSNHPQKTVLNYKKQGKGLVGMMPYYAPEEIVYAAGYLPVGMFGSQNPQISAARTYLPPFACSLMQADMELQLNGTYDCLDAVIFSVPCDTLRCMSQKWHGKAPVIVFTQPQNRKIRPAVDFLKAEYEHVRTELGRILNVKISDLAIQEAIKVYNENRQVMREFCDVAAQYPQIFTPIKRHDVIKARWFMDKAEHTALVRELIDAVKKEPVQPWNGKKVILSGIMAEPDEFLDIFSEFNIAVVADDLAQESRQFRTDVPSGIDPLEQLAQQWQDFDGCPLALNEDKPRGQMLIDMTKKYNADAVVICMMRFCDPEEFDYPIYKPEFEAAGVRYTVLDLDIESPSLEQLRTRIQAFSEIL

SEQ ID NO: 102 - protein, 519 aa, Saccharomyces cerevisiae
MFSRSTLCLKTSASSIGRLQLRYFSHLPMTVPIKLPNGLEYEQPTGLFINNKFVPSKQNKTFEVINPSTEEEICHIYEGREDDVEEAVQAADRAFSNGSWNGIDPIDRGKALYRLAELIEQDKDVIASIETLDNGKAISSSRGDVDLVINYLKSSAGFADKIDGRMIDTGRTHFSYTKRQPLGVCGQIIPWNFPLLMWAWKIAPALVTGNTVVLKTAESTPLSALYVSKYIPQAGIPPGVINIVSGFGKIVGEAITNHPKIKKVAFTGSTATGRHIYQSAAAGLKKVTLELGGKSPNIVFADAELKKAVQNIILGIYYNSGEVCCAGSRVYVEESIYDKFIEEFKAASESIKVGDPFDESTFQGAQTSQMQLNKILKYVDIGKNEGATLITGGERLGSKGYFIKPTVFGDVKEDMRIVKEEIFGPVVTVTKFKSADEVINMANDSEYGLAAGIHTSNINTALKVADRVNAGTVWINTYNDFHHAVPFGGFNASGLGREMSVDALQNYLQVKAVRAKLDE

SEQ ID NO: 103 - protein, 495 aa, Escherichia coli
MNFHHLAYWQDKALSLAIENRLFINGEYTAAAENETFETVDPVTQAPLAKIARGKSVDIDRAMSAARGVFERGDWSLSSPAKRKAVLNKLADLMEAHAEELALLETLDTGKPIRHSLRDDIPGAARAIRWYAEAIDKVYGEVATTSSHELAMIVREPVGVIAAIVPWNFPLLLTCWKLGPALAAGNSVILKPSEKSPLSAIRLAGLAKEAGLPDGVLNVVTGFGHEAGQALSRHNDIDAIAFTGSTRTGKQLLKDAGDSNMKRVWLEAGGKSANIVFADCPDLQQAASATAAGIFYNQGQVCIAGTRLLLEESIADEFLALLKQQAQNWQPGHPLDPATTMGTLIDCAHADSVHSFIREGESKGQLLLDGRNAGLAAAIGPTIFVDVDPNASLSREEIFGPVLVVTRFTSEEQALQLANDSQYGLGAAVWTRDLSRAHRMSRRLKAGSVFVNNYNDGDMTVPFGGYKQSGNGRDKSLHALEKFTELKTIWISLEA

SEQ ID NO: 104 - protein, 495 aa, Klebsiella pneumoniae
MNFQHLAYWQEKAKNLAIETRLFINGEYCAAADNTTFETIDPAAQQTLAQVARGKKADVERAVKAARQAFDNGDWSQASPAQRKAILTRFADLMEAHREELALLETLDTGKPIRHSLRDDIPGAARAIRWYAEALDKVYGEVAPTGSNELAMIVREPIGVIAAVVPWNFPLLLACWKLGPALAAGNSVILKPSEKSPLTALRLAGLAKEAGLPDGVLNVVSGFGHEAGQALALHPDVEVITFTGSTRTGKQLLKDAGDSNMKRVWLEAGGKSANIVFADCPDLQQAVRATAGGIFYNQGQVCIAGTRLLLEESIADEFLARLKAEAQHWQPGNPLDPDTTMGMLIDNTHADNVHSFIRGGESQSTLFLDGRKNPWPAAVGPTIFVDVDPASTLSREEIFGPVLVVTRFKSEEEALKLANDSDYGLGAAVWTRDLSRAHRMSRRLKAGSVFVNNYNDGDMTVPFGGYKQSGNGRDKSLHALEKFTELKTIWIALES

SEQ ID NO: 105 - DNA, 1053 bp, Issatchenkia orientalis
atgtcttacgaaatcccacaaacacaaaaggcctgtgtcttttacgaaaacggcggcccaatcacatacaaggacattccagttccaaagccaaaacctactgagattttagtcaaggttctgtactctggtgtctgccacaccgacttgcacgcatggaagggtgactggcctctagctaccaagttgccattggttggtggtcacgaaggtgccggtgttgttgttgccaagggtgaaaacgtcacctcttttgagattggtgattacgcaggtatcaagtggttgaatggttcatgtatgggttgtgaattctgtgaacaaggtgctgaaccaaactgtcctaaggccgacttgagtggttacacccacgacggttccttccaacagtatgctactgctgacgctattcaagctgcacacatctccaaggaaaccgacttggctggtgttgctccaatcttgtgtgcaggtgtcactgtctacaaggctttaaagactgcagaccttagagcaggtgaatgggtttgtatttccggtgcagctggtggtttaggttctcttgctattcaatatgcaaaggctatgggtctgagagttgttggtattgacggtggtgacgaaaagaaggaattgtgtaaatcccttggtgctgaagcatttattgatttcacaaagaccaaggatatcgtcaaggctgtccaagaggcaaccaatggtggtccacatggtgtcatcaatgtctctgtctctgaagctgcaatttctcaatcttgtgaatacgttagacctctaggtaaggttgttcttgttggtttaccagcaggcgcacaagtcaaaactggtgtctttgaagccgttgtcaagtctattgaaattaagggttcttatgtcggtaacagaaaggataccgccgaagcacttgacttctacactagaggcttggtcaagtctccattcaagattgtcggtttatccgaattgccaaaagtctttgaactcatggaacagggtaagattttaggtagaatggtcttagacacctccaaataa

SEQ ID NO: 106 - protein, 350 aa, Issatchenkia orientalis
MSYEIPQTQKACVFYENGGPITYKDIPVPKPKPTEILVKVLYSGVCHTDLHAWKGDWPLATKLPLVGGHEGAGVVVAKGENVTSFEIGDYAGIKWLNGSCMGCEFCEQGAEPNCPKADLSGYTHDGSFQQYATADAIQAAHISKETDLAGVAPILCAGVTVYKALKTADLRAGEWVCISGAAGGLGSLAIQYAKAMGLRVVGIDGGDEKKELCKSLGAEAFIDFTKTKDIVKAVQEATNGGPHGVINVSVSEAAISQSCEYVRPLGKVVLVGLPAGAQVKTGVFEAVVKSIEIKGSYVGNRKDTAEALDFYTRGLVKSPFKIVGLSELPKVFELMEQGKILGRMVLDTSK

SEQ ID NO: 107 - DNA, 1131 bp, Issatchenkia orientalis
atgtttgcatcaaccttcagaagtcaagctgtaagagctgcaagatttactagattccaatccacttttgccattcctgagaagcaaatgggtgttatctttgaaactcatggtggtcctttacaatacaaggaaattccagttccaaaaccaaaaccaactgaaattttaatcaatgttaaatactctggtgtctgccataccgatttacacgcatggaaaggtgactggccattaccagcaaagttacccctagttggtggtcacgaaggtgcgggcattgttgttgcgaaaggttctgcagttaccaactttgagattggcgattatgctggtattaagtggttaaacggttcatgtatgtcatgtgaattctgtgaacaaggtgatgaatctaactgtgaacatgccgatttgagtggttatactcatgatggttctttccaacaatatgccactgctgacgctattcaagctgcaaagatcccaaagggtaccgacttatctgaagttgcgccaattttatgtgctggtgttactgtctataaagctttgaaaactgctgatttaagagcaggtcaatgggttgcgatttctggtgccgctggtggtctaggttctcttgctgtccaatatgcaaaggcaatgggtctaagagttttaggtatcgatggtggtgaaggtaaaaaggaactttttgaacaatgtggtggtgatgtgtttatcgatttcaccagatacccaagagatgcacctgaaaagatggttgctgatattaaggctgcaactaacggtttgggtccacacggtgttatcaatgtctctgtctccccagctgctatctctcaatcatgtgactatgttagagcaactggtaaggttgtccttgtcggtatgccatctggtgctgtctgtaagtctgatgtcttcactcatgttgttaaatccttacaaattaaaggttcttatgttggtaacagagcagataccagagaagctttggaattctttaatgaaggtaaggtcagatctccaatcaaggttgtcccattatctactttacctgaaatttacgaattgatggagcaaggtaagattttaggtagatacgttgttgatacttctaaataa

SEQ ID NO: 108 - protein, 376 aa, Issatchenkia orientalis
MFASTFRSQAVRAARFTRFQSTFAIPEKQMGVIFETHGGPLQYKEIPVPKPKPTEILINVKYSGVCHTDLHAWKGDWPLPAKLPLVGGHEGAGIVVAKGSAVTNFEIGDYAGIKWLNGSCMSCEFCEQGDESNCEHADLSGYTHDGSFQQYATADAIQAAKIPKGTDLSEVAPILCAGVTVYKALKTADLRAGQWVAISGAAGGLGSLAVQYAKAMGLRVLGIDGGEGKKELFEQCGGDVFIDFTRYPRDAPEKMVADIKAATNGLGPHGVINVSVSPAAISQSCDYVRATGKVVLVGMPSGAVCKSDVFTHVVKSLQIKGSYVGNRADTREALEFFNEGKVRSPIKVVPLSTLPEIYELMEQGKILGRYVVDTSK

SEQ ID NO: 109 - DNA, 1134 bp, Issatchenkia orientalis
atgttatccaagaccatcactgctgcattgaggggcaatacaactcgtactgcattcagaatcaatgccattagaagtttagcgatcccagctattccagagacacaaaagggtgttatcttttatgagaacggaggtgaactattttacaaggacattccagttccaaagccaaagccaaatgagattttggtgaatgtcaagtattctggtgtttgtcataccgatttacacgcatggaaaggtgactggcctttggcgaccaagttgccattggttggtggacatgaaggtgccggagttgttgttgctaagggggacaatgtcaccaactttgaaattggcgattatgccggtatcaagtggttgaatggttcatgtatggggtgtgaattttgccaacaaggtgcagagccaaactgtccacaggccgacttgagtggttacacccatgacgggtcctttcaacaatatgccactgccgatgctgttcaggcagccaagattcctcagggcactgatttggctcaagttgcgccaattttatgtgcaggtattactgtctataaggctttaaagactgcagaattaagaccaggtcaatgggttgccatttctggtgctgctggaggtttaggttctcttgctgttcaatatgccaaggccatgggtttgagagttttgggtattgatggtggtgaggagaagggcaagtttgcaaagtctcttggagctgaagttttcattgatttcaccaaatccaaggacattgtcaaggatatccaagaggccaccaatggtggtccacatggtgtcattaatgtttctgtttctccagctgctatttctcaaagtacccagtatgtcagaaccttgggtaaggttgtccttgttggattaccagcgcatgctgtatgcgagtcttcggttttcgaccatgttgtcaagtcgattcaaattagaggctcttatgttggtaacagggaagatactagtgaggctattgattttttcaccaggggtttagtgaagtcaccaattaagattgttggtttgagtgagttgccaaagatctatgaattgatggagcaaggtaagattttaggcagatatgttgttgacacttcgaaatga

SEQ ID NO: 110 - protein, 377 aa, Issatchenkia orientalis
MLSKTITAALRGNTTRTAFRINAIRSLAIPAIPETQKGVIFYENGGELFYKDIPVPKPKPNEILVNVKYSGVCHTDLHAWKGDWPLATKLPLVGGHEGAGVVVAKGDNVTNFEIGDYAGIKWLNGSCMGCEFCQQGAEPNCPQADLSGYTHDGSFQQYATADAVQAAKIPQGTDLAQVAPILCAGITVYKALKTAELRPGQWVAISGAAGGLGSLAVQYAKAMGLRVLGIDGGEEKGKFAKSLGAEVFIDFTKSKDIVKDIQEATNGGPHGVINVSVSPAAISQSTQYVRTLGKVVLVGLPAHAVCESSVFDHVVKSIQIRGSYVGNREDTSEAIDFFTRGLVKSPIKIVGLSELPKIYELMEQGKILGRYVVDTSK

SEQ ID NO: 111 - DNA, 1347 bp, Issatchenkia orientalis
atgtctccttcacaaattaacgttgacaacttatctaattggactgaagaattcaaatctgacgccaagactcaaatcgggggttctgtattgcaacattccaacattgatgaggtcttgattaacagagatgcagaaatcgccaacaagcatatcttcaaccacaagattgaaattgaaggtctacctgtcatggatcagaaggcttctggtagatgttggttgtttgcatcgactaacttgatgcgtgttactgcaatgaagaaatacaatttgaaggaaatcaagctttccccatcgtatttgtttttctatgacaaattggaaagagcaaactatttccttgaacaaatcatcgacactcataaggaaccaatcgattcaagattggttcaatatttcctgaccaatccagttgaagatggtggtcaattcaccatgatggcacaaattgctaccaaatacggtgttgttcctgatcaagtctacccagattctttcaacacaaccacttcgaggattatgaacagattagtcaaccacagattacgttcttatgcaatgactttacgtaacgctctagatgaaggtaaagatgtaatgtccttgaagaatgagatgcaaaaagaaatttatcgtttgctaacaatgttccttggtaacccaccaaagccaaacgaagagtttgtctgggaattcaccgataaagatggtaaatatgaatctattaaaactacaccattaaaatatgcaactgaagttttggatttccatgctccagaatatgtttccttgttaaatgacccaagaaataagtataacaagatggttcaagttgaaagattaggtaatgttgctggtggcgaaccagttgcatacttaaacttagaaattgaaaagttatctcaagctgttgttaacagaatcaaaaataacaaaccagttttctttggtaccgatacacctaaatttatggataaaagtagaggtattatggatatcaatttatgggactatgagttattaggttatgatgtccgtaccatgtcaaagaaggaaagagttgtttttggtgattctttaatgacccacgctatgttgattactgcagtgcacgttgatgaaaatggcaaacctgtcagatacagagtcgaaaacagttggggtaccaagagtggtcaagaaggttattacacaatgacccaagaatattttgaagagtacgtttatcaagtagtcattgaaaagagtgaatttgctgccctaaacctcgatgtttccattctggaggataaagaaccagtcgtcttgccaccttatgaccctatgggtgcacttgctttataa

SEQ ID NO: 112 - protein, 448 aa, Issatchenkia orientalis
MSPSQINVDNLSNWTEEFKSDAKTQIGGSVLQHSNIDEVLINRDAEIANKHIFNHKIEIEGLPVMDQKASGRCWLFASTNLMRVTAMKKYNLKEIKLSPSYLFFYDKLERANYFLEQIIDTHKEPIDSRLVQYFLTNPVEDGGQFTMMAQIATKYGVVPDQVYPDSFNTTTSRIMNRLVNHRLRSYAMTLRNALDEGKDVMSLKNEMQKEIYRLLTMFLGNPPKPNEEFVWEFTDKDGKYESIKTTPLKYATEVLDFHAPEYVSLLNDPRNKYNKMVQVERLGNVAGGEPVAYLNLEIEKLSQAVVNRIKNNKPVFFGTDTPKFMDKSRGIMDINLWDYELLGYDVRTMSKKERVVFGDSLMTHAMLITAVHVDENGKPVRYRVENSWGTKSGQEGYYTMTQEYFEEYVYQVVIEKSEFAALNLDVSILEDKEPVVLPPYDPMGALAL

SEQ ID NO: 113 - DNA, 1737 bp, Issatchenkia orientalis
atgttactcagatcactaaactcttctgctcgttgtgtcaaacaaacaaccagaacaaaggttaggtatctcagccacgtcagtggtgcaagcatggcgaaacctacattgaagaacaactcgagagaatccaacaaatccagaaactatctaattgctgctgtgacagcattggctgtatcaacctcaattggagttgccgtacatgtgaaggaccccttgtataacgatgctaccggcagtgattctccgagaagtatatctgttgacgagtttgtcaagcataattcacaaaacgactgttggattgcaatcaatggcaaggtttatgatttcactgattttattccaaaccatccaggtggggtacctccattagttaatcatgctggttatgatggtactaaactttatgagaaattgcatccaaaaggtacaattgagaaattcttgccaaaggataagtttctgggtgtgttagatggtgaagcgccaaaattggaagcagactatttggtggacgatgatgaacaagagagactggattatttgaacaacttacctcctttgtcatctattcagaatgtttatgatttcgaatacttggccaagaagattttacctaaagatgcctgggcatattattcttgtggtgccgatgatgaaatcacaatgagagaaaaccattatgcttatcaaagagtttatttcagaccaagaatttgtgttgatgtcaaggaagttgatacttcttatgaaatgttaggcactaaaacctctgttcctttttatgtatctgccaccgctttggctaaattaggccatcctgatggtgaatgctcaattgctagaggcgctggtaaggaaggtgtcgttcaaatgatttcgaccctttcctcaatgtcattagatgaaattgccgctgctagaattccaggtgcaacccaatggttccaattatacattaatgaggatagaaatgtcgctaaaggtctggtcaaacatgcagaagacttgggtatgaaggctatctttataactgttgatgctccttctctaggtaacagagaaaaggataaaagattaaagtttgttaatgacaccgatgtcgatttgggtgattccgcagatcgaaacagtggtgcttcaaaggcactatcttcgttcattgatgcttctgtctcttggaatgacgtcaaagcggtcaagtcgtggactaaattgcctgtcttagttaaaggtgttcaaacagttgaagacgttattgaagcttacgatgctggttgtcaaggtgttgttttgtcaaaccacggtggtaggcaactagatactgctcctcctccaatcgaattattagctgaaactgttccaactttgaagagattgggtaaattaagaccagattttgaaattttaattgacggtggtgtcaaaagaggtaccgatattttgaaagcagtcgcaatcggtggccaagatgtcagagtttcagttggtatgggtagacctttcttatatgccaactcttgctatggtgaagcaggtgttagaaaattaattcaaaatctaaaggatgaattagaaatggatatgagattgttgggtgtcactaaaatggaccagctatcttcgaaacatgtcgatactaaacgtttgattggtagagatgcgatcaactatttgtatgataatgtatacagcccaatcgaaaccgttaaattcaacaatgaagattga

SEQ ID NO: 114 - protein, 578 aa, Issatchenkia orientalis
MLLRSLNSSARCVKQTTRTKVRYLSHVSGASMAKPTLKNNSRESNKSRNYLIAAVTALAVSTSIGVAVHVKDPLYNDATGSDSPRSISVDEFVKHNSQNDCWIAINGKVYDFTDFIPNHPGGVPPLVNHAGYDGTKLYEKLHPKGTIEKFLPKDKFLGVLDGEAPKLEADYLVDDDEQERLDYLNNLPPLSSIQNVYDFEYLAKKILPKDAWAYYSCGADDEITMRENHYAYQRVYFRPRICVDVKEVDTSYEMLGTKTSVPFYVSATALAKLGHPDGECSIARGAGKEGVVQMISTLSSMSLDEIAAARIPGATQWFQLYINEDRNVAKGLVKHAEDLGMKAIFITVDAPSLGNREKDKRLKFVNDTDVDLGDSADRNSGASKALSSFIDASVSWNDVKAVKSWTKLPVLVKGVQTVEDVIEAYDAGCQGVVLSNHGGRQLDTAPPPIELLAETVPTLKRLGKLRPDFEILIDGGVKRGTDILKAVAIGGQDVRVSVGMGRPFLYANSCYGEAGVRKLIQNLKDELEMDMRLLGVTKMDQLSSKHVDTKRLIGRDAINYLYDNVYSPIETVKFNNED

SEQ ID NO: 115 - DNA, 1698 bp, Issatchenkia orientalis
  misc_feature (941)..(941): N= A, C, T, or G
  misc_feature (943)..(943): N= A, C, T, or G
atgttaagatcccagttcaaaaacattttgaaaaatgttaacaagaaccattctctaaggagaacttttacttccagcacctcaaaggctggaaaaaatgcttcatacaatgccaagattatatctgcaaccgtggcctcgattgttgcagcagctggctcttatatgttggtccagccttcactagctaatgatgaggcacagtctgctaatccaactaggaagatctctgttgacgaatttgttaaacacaaccatgccgatgattgttggatcactgttaacggtaacgtctatgacttgactgatttcatttcaatgcatccaggtggtactaccccattgattcaaaatgcaggtcacgacgcaactgaaatttacaacaagattcatccaaagggtacaatcgagaacttcttaccaaaggaaaagcaattgggtgttttggatggtgaagctcctaaaatcgaagttgtgcttgacgaaaaggagaaacacagattggagttgttgaatcatctccctgctctttccagaattcaaaacatttatgatttcgaacatattgcttctagagttttgagcgaccaagcatggaactactattcatgtggtgccgaagatgaaatcaccttgagggaaaatcattatgcttaccaaagaatctactttaagccaaaatgttgtgtcaatgttgcagaagttgatacctctcatgaaattttaggtacaaaagcttctgttcctttctacgtttccgcagccgcttctgcaaagttggggcacgaggatggtgaatgttccattgctagaggtgcaggtaaggaaggcgttattcaaatgatttcttccttctcttccaactctttggaggaaattgcagaatccagaattcctggtgcaacacaatggtttcaattatacgttaatgaagacaaggntnttgtgaagaagactttaaaaagggccgaaaacttgggtatgaaggccatctttgtcactgtggacgctgctagtagaggtaatagagaaaaagacattacaatgagaattaccgaagatacagatgagttaatagacgattcttctgttagagctggttctacctctggtgcattgccagctttcattgacaagaggctgacttgggatgaagttaaggatatcatttcatggaccaagttaccagttttgctgaagggtgttcaaagaactgatgatattgagaaggcaattgatattggttgtaagggtgttgtcttgtccaatcatggtggtagacaattagatacttctcctcctccaatagaagttatggctgaatctgttccaatcctaaagcaaaagggtaaactggatccaaatttcagtattttcgttgatggtggtgttagaagaggtacagatattttgaaagctttggctattggtggcagagactgtaaagttgctgttggtctgggtagacctttcctttatgcaaatactggttatggtgaaaagggtgtcagaaaggccgtgcaaattctaagagaagaattaaaggctgacatgagaatgttgggcgttacctctttgaacgagctagacgactcttacattgacaccagaagattactaggtagagatgctgttaaccacatatacaacaacaactactacccaatgtctaagattcaattcaaaaacgaaaaataa

SEQ ID NO: 116 - protein, 565 aa, Issatchenkia orientalis
  MISC_FEATURE (314)..(314): Xaa = Asp, Gly, Ala, or Val
  MISC_FEATURE (315)..(315): Xaa = Ile, Val, Leu, or Phe
MLRSQFKNILKNVNKNHSLRRTFTSSTSKAGKNASYNAKIISATVASIVAAAGSYMLVQPSLANDEAQSANPTRKISVDEFVKHNHADDCWITVNGNVYDLTDFISMHPGGTTPLIQNAGHDATEIYNKIHPKGTIENFLPKEKQLGVLDGEAPKIEVVLDEKEKHRLELLNHLPALSRIQNIYDFEHIASRVLSDQAWNYYSCGAEDEITLRENHYAYQRIYFKPKCCVNVAEVDTSHEILGTKASVPFYVSAAASAKLGHEDGECSIARGAGKEGVIQMISSFSSNSLEEIAESRIPGATQWFQLYVNEDKXXVKKTLKRAENLGMKAIFVTVDAASRGNREKDITMRITEDTDELIDDSSVRAGSTSGALPAFIDKRLTWDEVKDIISWTKLPVLLKGVQRTDDIEKAIDIGCKGVVLSNHGGRQLDTSPPPIEVMAESVPILKQKGKLDPNFSIFVDGGVRRGTDILKALAIGGRDCKVAVGLGRPFLYANTGYGEKGVRKAVQILREELKADMRMLGVTSLNELDDSYIDTRRLLGRDAVNHIYNNNYYPMSKIQFKNEK

SEQ ID NO: 117 - DNA, 1167 bp, Issatchenkia orientalis
atggtgtcccctgctgaaagattatctactattgcgtccacaatcaagccaaacagaaaagattctacatcattacaaccagaagactatccggaacatccgttcaaggtgacggttgttggttccggtaactgggggtgtacaattgccaaggttatagcggaaaacaccgttgagagacctcgtcaatttcaaagagatgttaatatgtgggtctatgaagaattgattgaaggcgaaaagttgactgaaatcataaataccaaacacgaaaacgtcaagtacttgccaggtatcaagttgccagttaacgttgttgcagttccagacattgttgaggcttgtgcaggctcagacttgattgtctttaatattcctcaccaatttttaccaagaattttatcccaattaaagggtaaggtgaatccaaaggctagagcaatttcttgtttgaaaggtttggatgtcaatcctaatggatgtaagttgctctccactgttattactgaagagttgggtatttattgtggtgccttatcaggtgctaatttagctcctgaagttgcacaatgtaaatggtcggaaacaactgttgcatatacaattccggacgatttcagaggtaaaggcaaggatattgaccatcaaattctaaagagtttgttccatagaccttatttccatgttcgtgttattagtgatgttgcaggtatttccattgccggtgcactcaagaatgtcgttgctatggctgctggatttgtcgaaggtttaggttggggtgataatgcaaaggctgcagtcatgagaataggtttggtggaaaccattcaatttgccaagacttttttcgatggctgtcatgctgcaacctttactcatgaatctgcaggtgttgccgacctaatcactacctgtgccggcggccgtaacgttagagttggtagatatatggcacaacattctgtctctgcaacggaggctgaagaaaagttgttgaatggccaatcctgtcaaggtatccacacaactagggaagtttacgagttcctctccaacatgggcaggacagatgagttcccactatttaccaccacctaccgtatcatctacgaaaacttcccaattgagaagctgccagaatgccttgaacctgtggaagattaa

SEQ ID NO: 118 - protein, 388 aa, Issatchenkia orientalis
MVSPAERLSTIASTIKPNRKDSTSLQPEDYPEHPFKVTVVGSGNWGCTIAKVIAENTVERPRQFQRDVNMWVYEELIEGEKLTEIINTKHENVKYLPGIKLPVNVVAVPDIVEACAGSDLIVFNIPHQFLPRILSQLKGKVNPKARAISCLKGLDVNPNGCKLLSTVITEELGIYCGALSGANLAPEVAQCKWSETTVAYTIPDDFRGKGKDIDHQILKSLFHRPYFHVRVISDVAGISIAGALKNVVAMAAGFVEGLGWGDNAKAAVMRIGLVETIQFAKTFFDGCHAATFTHESAGVADLITTCAGGRNVRVGRYMAQHSVSATEAEEKLLNGQSCQGIHTTREVYEFLSNMGRTDEFPLFTTTYRIIYENFPIEKLPECLEPVED

SEQ ID NO: 119 - DNA, 1566 bp, Issatchenkia orientalis
atgttgtccctctctaaacagtcaagaaactttttcaaattgaactatttttcagtcacccaaatagcaaaaatgtctgcaacttccgtcactttcccaattatcaacgaaacttaccaacagccaaccgggcttttcatcaacaatgaatttgttagtgcaaagtcaggtaagacttttgatgttaacaccccaattgatgagtctctcatttgtaaagtccaacaggccgatgctgaagatgttgaaattgccgttcaagcagcatctaaagcttacaagacttggagatttacaccgccaaatgaaagaggcagatacttgaacaaattggccgatttgatggacgaaaagagagacttacttgccaaaattgaatcccttgataatggtaaggccttacattgtgcaaaattcgatgtcaatcttgtcattgaatatttcagatactgtgcaggttactgtgataaaatcgatggtagaacaattacaaccgatgtagaacattttacctacactagaaaggaacctttaggtgtctgtggtgcaattacaccttggaacttcccattgctgatgtttgcttggaaaatcggcccggctttagcaaccggtaataccattatcttgaagcctgccagtgcaacacctctatcaaacctctttacttgtaccttgatcaaggaggcgggcattccagccggtgttgttaatgttgttccaggttccggtagaggctgtggtaactccattttacaacatcctaaaattaagaaggttgcgtttaccggatctacagaagttggtaaaactgttatgaaggaatgtgctaattccatcaaaaaggttactctcgaattgggtggtaagtctccaaacattgttttcaaagactgtaacgttgaacaaaccattcaaaatttgattactggtattttcttcaatggtggtgaagtctgttgtgctggttctagaatttacattgaagcaaccgatgagaaatggtatactgaattcttgaccaaattcaaggagactgttgaaaaattaaagattggtaacccatttgaagagggtgttttccaaggtgcacaaaccactccagatcaattccaaactgtcttggactacatcaccgctgctaacgaatccagcttgaaactattaactggtggtaaaagaattggcaataagggatactttgttgagccaactatcttctacgatgttcctcaaaattccaagttaactcaagaagaaatctttggtccagttgctgttgttttacctttcaagtccactgaagaattgattgaaaaggcaaatgattccgattttggcttaggttccggtattcacactgaagatttcaacaaggcaatttgggtttccgaaaggcttgaagcaggttctgtttggatcaacacttacaatgatttccacccagctgctccattcggtggttacaaggaatccggtattggcagagaaatgggtattgaagctttcgacaactatactcaaaccaagttagttagagctagagttaacaagccagctttttag

SEQ ID NO: 120 - protein, 521 aa, Issatchenkia orientalis
MLSLSKQSRNFFKLNYFSVTQIAKMSATSVTFPIINETYQQPTGLFINNEFVSAKSGKTFDVNTPIDESLICKVQQADAEDVEIAVQAASKAYKTWRFTPPNERGRYLNKLADLMDEKRDLLAKIESLDNGKALHCAKFDVNLVIEYFRYCAGYCDKIDGRTITTDVEHFTYTRKEPLGVCGAITPWNFPLLMFAWKIGPALATGNTIILKPASATPLSNLFTCTLIKEAGIPAGVVNVVPGSGRGCGNSILQHPKIKKVAFTGSTEVGKTVMKECANSIKKVTLELGGKSPNIVFKDCNVEQTIQNLITGIFFNGGEVCCAGSRIYIEATDEKWYTEFLTKFKETVEKLKIGNPFEEGVFQGAQTTPDQFQTVLDYITAANESSLKLLTGGKRIGNKGYFVEPTIFYDVPQNSKLTQEEIFGPVAVVLPFKSTEELIEKANDSDFGLGSGIHTEDFNKAIWVSERLEAGSVWINTYNDFHPAAPFGGYKESGIGREMGIEAFDNYTQTKLVRARVNKPAF

SEQ ID NO: 121 - DNA, 1506 bp, Issatchenkia orientalis
atgtcagcactgttcagaaccattgagactccaaacggtaaaaccctggaacaaccactgggtctcttcatcgacaatgagtgggtgaaaacaaaccgtacttttgagaccattaatccgtccacaggtgaggcgatctgtcatgtttaccgtgctggggtccaggaggtgaacgacgctgtcgaagctgcaaatagagcatttagaaacgaatcttggtcaggtctaactggttctcaacgtggcgatttactgtatcgcatgtaccaagttatcaaaagagacgccgagagcattgcatcgattgagtccatggataatggtaaaccgtatgctgcagaatgcctagatggagatttaggtgaagctgctgacgttttcaaatattatgccggttgggccgacaagatcaccggtgaactcattggctcgagtgtattgggtaagaataagatgtgttatgtcgagcctacaccactgggtgccgttggcggtatagtcccttggaatttcccgtttaccatgatggcatggaaaattgccccggcactggcgacgggttgtacagtggttatgaagtcaagtgaagtcacaccgttgacggcattatggtatggcaagattgcacttgaagtgggtctacctaaaggtgtacttaacatcctctccggttttggatcggatgttggatcggccatggcttcacatccaaagttggctaagatagcgttcactggctcaactgcaactggtaaaaaaatcatggaagcagcaggtggttccaacttgaaaaaggttacactagagtgtggtggtaaatctccttacattgtttttgatgatgctgacttagaattggcagtagaatgggcatattggggtatttggtataacaaaggtgaggtttgtacttcaacttcgagatttttgattcaggaagacatttacgataagtttgttgagagttttgttgagttgaccaagacgagagcaatcactgctgatccgtttgatgatagatgcactatcgggcctttggtttctagctcacagtacgaaaaagtcaaaaagtacgttgaaataggtaaaaatgaaggagcaaagctactaactggcaaattcatcgacgggccaggctatttctgtgagccatttatcttcagtgaatgcactgacgatatgacaatcatgaaagaggaaatctttggccctgttgtggggattactaaattctcaacggttaaagaggcgatcgagagagccaatgctacgacttacggtttaggagctgcgttgttttcctctaacataacaaaggcacattctgtggctgccaagttggaggctggaatggtgtggatcaattctaatggtgattctgatatccacattccatttggtggttccaaaatgagtggtataggtagggagttggggccatacgcactagacttgtttactgagaaaaaggcagttcatgtcaacttatcgcttccggtcaagtga

SEQ ID NO: 122 - protein, 501 aa, Issatchenkia orientalis
MSALFRTIETPNGKTLEQPLGLFIDNEWVKTNRTFETINPSTGEAICHVYRAGVQEVNDAVEAANRAFRNESWSGLTGSQRGDLLYRMYQVIKRDAESIASIESMDNGKPYAAECLDGDLGEAADVFKYYAGWADKITGELIGSSVLGKNKMCYVEPTPLGAVGGIVPWNFPFTMMAWKIAPALATGCTVVMKSSEVTPLTALWYGKIALEVGLPKGVLNILSGFGSDVGSAMASHPKLAKIAFTGSTATGKKIMEAAGGSNLKKVTLECGGKSPYIVFDDADLELAVEWAYWGIWYNKGEVCTSTSRFLIQEDIYDKFVESFVELTKTRAITADPFDDRCTIGPLVSSSQYEKVKKYVEIGKNEGAKLLTGKFIDGPGYFCEPFIFSECTDDMTIMKEEIFGPVVGITKFSTVKEAIERANATTYGLGAALFSSNITKAHSVAAKLEAGMVWINSNGDSDIHIPFGGSKMSGIGRELGPYALDLFTEKKAVHVNLSLPVK

SEQ ID NO: 123 - DNA, 1506 bp, Issatchenkia orientalis
atggctcttccacttgcaactacaatctccttatcaagcggcaaaacattagaacagccaattggtttatttattgataatgaatttgtcaatccaatttctgtttctaatgcaagaacactaacaaccttcaacccaagcacaggtgagccaataaccgatgttcattgtgcctcagctgcagatgttgatgttgcggtaaatgctgcaaacaaggcaatggaaacatggaaagacattgatcctactgttcgtgtcgaacttttactaaaattggccagcttagttgacgagcattcccaagcaattgctgaaattgaagcactagactcgggtaaaccattgtactcgaatgcactggcggatgttcaatcggttgctgagtacttaaggtactgtgccggttgggcggataaattacacggtacgcaaattccaataaactctaaggtaatggctattacaaaacgtgtacccttagttgtcggctgcatcattccatggaactacccaatttcaatggcctcctggaagttctgtccagcattggctgccggatgtactattgtaatgaagtcaagtgagataaccccgttatcgttactttattttgcgaatttggtcaaattagcaggtttccctaagggtgtttttaatgtcgtctctggatttggtgatgatgttggctcagcgctttcaaatcacccaaagttgggtaagattgcatttacaggctcgaccttgaccgggcaaaaggtgatggcggatgctgccagatcaaatttgaaaagcgtatctttggaatgtggtggtaaatctccacttattgtcttcgaagatgcagaattggatgaatgcgttaaatgggcaagttttggtgtcatgtataacaccggacaaaattgtactgccaattctcgtattattgtgcatgataaggtttatgatcaatttatcgaaaagttcctgtctcaactcaaggaagattggaaaatgggagatgtcatgaatgaaaagactacattgggaccacttgtcagccaacaacaatatgagcgtgttcagtcgtatattgatataggtgtcaaagaaggggctacactgattcaaccgcttaaggagagcactccatcaaatggattctacatctctcctactgtttttactaacgttaaggaagatatgagaattgttaaggaggaaatatttggtcctgtcgtaactatctccaaattctcaactgaggaagaggcaatttcaaaggcgaatgatacaatttatggcttagctgcaatgttatttactactaattttgaacgtgccaacagagttgctgataagctggaagctggcagtgtgtacattaatagctctaacaacgagagtaccaaagttccatttggaggaatgaagatgagtggtattggaagagagttggggcaagaagcatttaatttgtacactgttacaaagagtatttattatagttatggtgctaagctttaa

SEQ ID NO: 124 - protein, 501 aa, Issatchenkia orientalis
MALPLATTISLSSGKTLEQPIGLFIDNEFVNPISVSNARTLTTFNPSTGEPITDVHCASAADVDVAVNAANKAMETWKDIDPTVRVELLLKLASLVDEHSQAIAEIEALDSGKPLYSNALADVQSVAEYLRYCAGWADKLHGTQIPINSKVMAITKRVPLVVGCIIPWNYPISMASWKFCPALAAGCTIVMKSSEITPLSLLYFANLVKLAGFPKGVFNVVSGFGDDVGSALSNHPKLGKIAFTGSTLTGQKVMADAARSNLKSVSLECGGKSPLIVFEDAELDECVKWASFGVMYNTGQNCTANSRIIVHDKVYDQFIEKFLSQLKEDWKMGDVMNEKTTLGPLVSQQQYERVQSYIDIGVKEGATLIQPLKESTPSNGFYISPTVFTNVKEDMRIVKEEIFGPVVTISKFSTEEEAISKANDTIYGLAAMLFTTNFERANRVADKLEAGSVYINSSNNESTKVPFGGMKMSGIGRELGQEAFNLYTVTKSIYYSYGAKL

SEQ ID NO: 125 - DNA, 1544 bp, Issatchenkia orientalis
  misc_feature (1319)..(1319): N= A, C, G, OR T
atgatgggcgcaactacagcaaaaattagtattccaaatggtaacaaatacgagcaacctacaggtttgttcatcaatggtgagtttgttgcttcaagtgatggtaaaactgcagaagttgagaatccaggcaatggaaacattgtatgttctgtccacttagcttctattgaggatattaataccgccgtagaagctgctgaagatgcatttttcaaaaggtgggccaccatcagtggtaaagccaagggagaatacttgagtaagattgccgatctaatcgttaaatattctgatcaattggcagatctagaggctattgaatcaggtaagccaaaggacaccaatgcaatctttgatgttttacattcggctgatgttttcagatactatgctggcaaggctgtcactgcacaaagcggcaagactatcgagtccgaactctccaaatttacatacacagtttacgagccctatggtgtttgtgccgctatcatcgcatggaacttcccaatgagcacatttgcgtggaaagttgcggcatgtttagctgctggtaatacaatggttgtcaaaacttccgagctgactccgttatctgcattgttcatgtgtaagattttccaagaagcagatctacctgctggagttataaacgtcacatgtggtttaggttctgttgcaggtgttcgattgagtgaacatgaaaaggttcagaaaatttcgtttactggctccactggcgttggtaagttgatccaagaatccgcagcaaagtctaacttaaagtattgtacgcttgaatgtggtggtaagtctccgttagtgatttacgaggatgcagatcttgagcaagcagtgaagtgggctgcctttggtatttttttcaacaaaggtgaaatttgcacagcctcttccagaatatatgttcaagaatcagtctatgacaaatttttgactatgtacaaggatcatgtggaagaagcctatgttcaaggagaacagtttgccactggtgttaacgttgggcctactgtctgcaaagcccaacaagagaaaatactggcctacattgaaagtgccaagcaagaaggtggtagaattatcactggtggtaaaataccatcttacacgaacaaaaatggttactatctcgaaccaacaattattgcagattgtaaccaggatatgaaggtagtcagggaagagattttcggaccagtcgttactgtatccaaattcactagtgatgaagaagccatcaaattaagcaatgattccgaatatggcttggcagcatatttattcactystsrasnassrgttyrgytaaaatyrththraaggacctcgttagatctcagaattatatcagaaaagtgcaaagcggacaggtctttgtcaacttcacctttgcggctgatttcaggttgccatttggcggatataagatgagtggtaacggaagagagcttggtgatgaaggactgagtgctttccagcaagtcaaagcagtacacattaatctcactgggaagttgtaa

SEQ ID NO: 126 - protein, 503 aa, Issatchenkia orientalis
MMGATTAKISIPNGNKYEQPTGLFINGEFVASSDGKTAEVENPGNGNIVCSVHLASIEDINTAVEAAEDAFFKRWATISGKAKGEYLSKIADLIVKYSDQLADLEAIESGKPKDTNAIFDVLHSADVFRYYAGKAVTAQSGKTIESELSKFTYTVYEPYGVCAAIIAWNFPMSTFAWKVAACLAAGNTMVVKTSELTPLSALFMCKIFQEADLPAGVINVTCGLGSVAGVRLSEHEKVQKISFTGSTGVGKLIQESAAKSNLKYCTLECGGKSPLVIYEDADLEQAVKWAAFGIFFNKGEICTASSRIYVQESVYDKFLTMYKDHVEEAYVQGEQFATGVNVGPTVCKAQQEKILAYIESAKQEGGRIITGGKIPSYTNKNGYYLEPTIIADCNQDMKVVREEIFGPVVTVSKFTSDEEAIKLSNDSEYGLAAYLFTKDLVRSQNYIRKVQSGQVFVNFTFAADFRLPFGGYKMSGNGRELGDEGLSAFQQVKAVHINLTGKL

SEQ ID NO: 127 - DNA, 1716 bp, Issatchenkia orientalis
  misc_feature (655)..(655): n is a, c, g, or t
atggctccaactgctgttgatatccataacgagtacaaacagaatgtttccaacgaacaggaaattcctttcaacaaaactgaaagaaagtcatcgattgcatctaaattaggactgaatccagacgctaagattcactacaattctgctgttcctatattatacgaagatggtttaaaggaaaaaggtacaaccatttcctcttctggtgcattgattgcattctctggttccaaaacaggtagatctccaaaggacaaaagaattgtcgatgaagagacttcaacagacaacatctggtggggtccagtcaataagaaggttgatgaaaacacttggaatatctcgaaatctagagcgattgattatttgagaacaagagagaaggtttacattatcgatgcttttgctggttgggatccaagatacagaattaaggttagaattgtctgtgctagagcttaccatgctttgttcatgaagaatatgttaattagaccaacaacggaagaattaaagaactttggtgagcctgatttcaccatttggaatgcaggtcaattccctgctaatgtttacactaagggtatgacttcttcaacttctgttgaaataaatttcaagtctthrysgymtthrsrsrthrsrvagtasnhyssratggaaatggttatcctaggtactgaatacgcaggtgaaatgaagaaaggtatctttaccgttatgttctacttgatgccaatcagacacaaggttttaactttacactcttctgcaaatcaaggtaaaaaggatggtgatgtcacattattctttggtttatctggtacaggtaaaacaaccttgtctgcagatcctcatagagaattgattggtgatgatgaacattgctggtctgatcatggtgttttcaacattgaaggtggatgttatgctaagtgtttggacttatctgctgaaagagaacctgagattttcaatgcaattaggtttggatctgtcttggagaatgttgtctatgatccagttgatagaactgttgactattccgctgctaatgtcactgaaaatactagatgtgcttatcctatcgactttattccttctgctaagatcccatgtctggcagattctcatccaaagaatattgttcttttaacttgtgatgcaagaggtgttttgccacctgtctccaagctaactaatgcacaagtcatgtatcactttatctctggttacacctccaagatggcaggtaccgaagttggtgtcactgaaccagaagcaaccttctctgcatgttttggtcaacctttcttagttttacatccaatgaaatacgcacaacaactctctgataaaatggctgaacattcttccaccgcttggttattgaataccggttggactggtcaatcttatgttaaaggtggtaagagatgtccattgaagtatactagagcaattttagatgctattcactctggtgagcttgcaaaacaggaattcgaaacataccctactttcggtttacaagttccaaaaacttgtccaggtgtcccagaaagtgttctgaacccatctaaacactgggctactggtgaagctgatttcaaggctgaagtcactaacttggctaaattatttgctgagaactttgaaaagtattctgcagaatgtactgcagaagttgttgctgctggtcctgctttataa

SEQ ID NO: 128 - protein, 560 aa, Issatchenkia orientalis
MAPTAVDIHNEYKQNVSNEQEIPFNKTERKSSIASKLGLNPDAKIHYNSAVPILYEDGLKEKGTTISSSGALIAFSGSKTGRSPKDKRIVDEETSTDNIWWGPVNKKVDENTWNISKSRAIDYLRTREKVYIIDAFAGWDPRYRIKVRIVCARAYHALFMKNMLIRPTTEELKNFGEPDFTIWNAGQFPANVYTKGMTSSTSVEINFKSMEMVILGTEYAGEMKKGIFTVMFYLMPIRHKVLTLHSSANQGKKDGDVTLFFGLSGTGKTTLSADPHRELIGDDEHCWSDHGVFNIEGGCYAKCLDLSAEREPEIFNAIRFGSVLENVVYDPVDRTVDYSAANVTENTRCAYPIDFIPSAKIPCLADSHPKNIVLLTCDARGVLPPVSKLTNAQVMYHFISGYTSKMAGTEVGVTEPEATFSACFGQPFLVLHPMKYAQQLSDKMAEHSSTAWLLNTGWTGQSYVKGGKRCPLKYTRAILDAIHSGELAKQEFETYPTFGLQVPKTCPGVPESVLNPSKHWATGEADFKAEVTNLAKLFAENFEKYSAECTAEVVAAGPAL

SEQ ID NO: 129 - protein, 267 aa, Saccharomyces cerevisiae
MSQGRKAAERLAKKTVLITGASAGIGKATALEYLEASNGDMKLILAARRLEKLEELKKTIDQEFPNAKVHVAQLDITQAEKIKPFIENLPQEFKDIDILVNNAGKALGSDRVGQIATEDIQDVFDTNVTALINITQAVLPIFQAKNSGDIVNLGSIAGRDAYPTGSIYCASKFAVGAFTDSLRKELINTKIRVILIAPGLVETEFSLVRYRGNEEQAKNVYKDTTPLMADDVADLIVYATSRKQNTVIADTLIFPTNQASPHHIFRG

SEQ ID NO: 130 - DNA, 420 bp, Streptomyces avermitilis
atgttaagaaccatgttcaaatctaagattcacagagcaactgttactcaagcagatctccattatgttggttccgttactattgatgcagacttgttagacgcagcagacttgttgccaggtgaattggttcacatcgttgacattacgaacggtgctagattggaaacttacgtcattgaaggtgaacgtggttccggtgttgttggtatcaatggtgctgccgctcatttagttcatcctggtgatcttgttatcattatctcctatgcacaagtttcagatgcagaagcacgtgcattgcgtccaagagttgttcacgttgacagagacaatagagttgttgcgcttggtgcggatccagccgaaccagtcccaggttccgaccaagctagatccccacaagctgttactgcataa

SEQ ID NO: 131 - DNA, 384 bp, Clostridium acetobutylicum
atgcacttgaacatgttgaagtccaagatccacagagctaccgtcgttcaagcagacttgaactacgtcggttccatcaccatcgacagaaacttgatggacaaggcaaacatcttggaatacgaaaaggtcgagatcgcaaacatcaacaacggtgcaagattcgaaacctacgtcatcgctggtgaggctggttccggtatcatctgtttgaacggtgctgctgcaagatgtgcacaagcgggtgacaaggttatcatcatgtgttactgttccttgaccccagaagaagcttccgagcacagaccaaaggtcgttttcgtcaacgacgacaactccatctccaacgtcaccgaatacgagaagcacggcaccatcggttaa

SEQ ID NO: 132 - DNA, 354 bp, Helicobacter pylori
atgaccttcgagatgttgtactccaagatccacagagcaaccatcaccgacgcaaacttgaactacatcggctccatcaccatcgacgaggacttggctaagttggctaagttgagagagggtatgaaggtcgaaatcgtcgacgtcaacaacggcgagagattctccacctacgtcatcttgggtaagaagagaggtgaaatctgcgtcaacggtgcagcagccagaaaggtcgctatcggtgacgtcgtcatcatcttggcttacgcatccatgaacgaggacgagatcaacgctcacaagccatccatcgtcttggtcgacgaaaagaacgaaatcttggaaaagggttaa

SEQ ID NO: 133 - protein, 117 aa, Helicobacter pylori
MTFEMLYSKIHRATITDANLNYIGSITIDEDLAKLAKLREGMKVEIVDVNNGERFSTYVILGKKRGEICVNGAAARKVAIGDVVIILAYASMNEDEINAHKPSIVLVDEKNEILEKG

SEQ ID NO: 134 - DNA, 387 bp, Bacillus sp. TS25
atgtacagaaccatgatgaagtccaagttgcacagagcgaccgtcaccgaagcaaacttgaactacgtcggttccatcaccatcgaccaagacttgatggaagctgcagacatcttggaaaacgagaaggtccaaatcgtcaacaacaacaacggtgctagattcgaaacctacgtcatcgctggtccaagaggctccggcaccatctgtttgaacggtgcagcagcaagattggtccaaccaggtgacaccgttatcatcatctcctacgcaatgttggaagaagccgaggctagaaagcaccaacctgtcgtcgttttgttgaacccagacaacaccatccaagaattgatcagagaaacccacggtgctaccgctaccgtctaa

SEQ ID NO: 135 - protein, 128 aa, Bacillus sp. TS25
MYRTMMKSKLHRATVTEANLNYVGSITIDQDLMEAADILENEKVQIVNNNNGARFETYVIAGPRGSGTICLNGAAARLVQPGDTVIIISYAMLEEAEARKHQPVVVLLNPDNTIQELIRETHGATATV

SEQ ID NO: 136 - DNA, 411 bp, Corynebacterium glutamicum
atgttgagaaccatcttgggttccaaaatccacagagctaccgttacccaagcagacttggactacgttggttcagtcaccatcgatgcagacttggttcatgccgcaggtttgatcgaaggtgaaaaggttgccatcgtcgacatcaccaatggcgctagattggaaacctacgttatcgttggtgatgctggcaccggtaacatctgtatcaacggtgcagcagcacacttgatcaacccaggtgatttggttatcatcatgtcctacttgcaagctaccgatgcagaggccaaggcttacgaaccaaagatcgttcacgtcgacgcagacaacagaatcgttgctttgggtaacgacttggcagaagctttgcctggttccggtttgttgacctcaagatctatctaa

SEQ ID NO: 137 - protein, 136 aa, Corynebacterium glutamicum
MLRTILGSKIHRATVTQADLDYVGSVTIDADLVHAAGLIEGEKVAIVDITNGARLETYVIVGDAGTGNICINGAAAHLINPGDLVIIMSYLQATDAEAKAYEPKIVHVDADNRIVALGNDLAEALPGSGLLTSRSI

SEQ ID NO: 138 - DNA, 384 bp, Bacillus licheniformis
atgtacagaaccttgatgtccgctaagttgcacagagctagagtcaccgaagcaaacttgaactacgttggttccgtcaccatcgacgaggacttgttggacgcagtcggtatgatggcaaacgaaaaggtccaaatcgtcaacaacaacaacggtgctagattggaaacctacatcatccctggtgagagaggttccggtgtcgtctgtttgaacggtgctgcagctagattggtccaagttggtgacgtcgttatcatcgtttcctacgccatgatgtccgaagaagaagcaaagacccacaagccaaaggtcgctgttttgaacgaaagaaacgaaatcgaagagatgttgggtcaagaaccagctagaaccatcttgtaa

SEQ ID NO: 139 - protein, 127 aa, Bacillus licheniformis
MYRTLMSAKLHRARVTEANLNYVGSVTIDEDLLDAVGMMANEKVQIVNNNNGARLETYIIPGERGSGVVCLNGAAARLVQVGDVVIIVSYAMMSEEEAKTHKPKVAVLNERNEIEEMLGQEPARTIL

SEQ ID NO: 140 - DNA, 1356 bp, Streptomyces avermitilis
atgacaccacagccaaacccacaagtcggtgcagcagtcaaagctgcagatagagcacacgtcttccactcttggtctgcacaagaattgatcgatccattggctgttgctggtgcagagggttcctacttctgggattacgatggtagacgttaccttgacttcacctccggcttagtcttcaccaacatcggttaccaacacccaaaggttgtcgcagctatccaagaacaagccgcatctttgactacatttgccccagctttcgcagttgaagcaagatccgaagctgcaagattgatcgctgagcgtactccaggtgatttagacaaaatcttcttcaccaacggtggcgcagatgctatcgagcacgctgttcgtatggcaagaatccacgctggtagaccaaaggtcttatccgcatacagatcataccacggtggtacacaacaggcagtcaacatcactggtgatccaaggagatgggcatccgattccgcttctgctggcgttgtccacttctgggctccatacttatacagatccagattctacgccgaaactgagcaacaagaatgtgagcgtgctcttgagcacttggaaactactatcgccttcgaaggtccaggtactattgccgctatcgttttggaaactgtcccaggtactgctggtatcatggttcctccaccaggttacttagcaggtgttagagaattgtgtgacaaatacggtatcgtcttcgtcttggatgaagtcatggctggtttcggcagaactggcgaatggttcgctgcagacttattcgatgttaccccagacttgatgaccttcgctaagggtgtcaactcaggttacgttccattgggtggtgttgctatctccggcaaaatcgcagagactttcggtaagagagcttacccaggtggtttgacgtactccggtcaccctcttgcttgcgcagccgctgttgctactatcaacgttatggcagaagaaggtgtcgttgaaaacgctgcaaacttgggtgctagagttatcgaaccaggtttgagagaacttgcagagagacacccatcagttggtgaagttagaggtgttggtatgttctgggctttggaattggttaaggatagagaaaccagagaacctttggtcccatacaatgccgctggtgaagcgaacgcaccaatggctgctttcggtgcagctgcaaaggcaaacggtttgtggccattcatcaacatgaacagaacccacgttgttcctccttgtaacgttaccgaagccgaagctaaagaaggcttggcagcattggatgcagctttatctgttgcagatgagtacactgtctaa

SEQ ID NO: 141 - DNA, 1416 bp, Saccharomyces cerevisiae
atgtccatctgtgagcaatactacccagaagaaccaaccaagccaaccgtcaagaccgaatccatccctggtccagaatcccaaaagcaattgaaggaattgggtgaagttttcgacaccagaccagcttacttcttggcagactacgaaaagtccttgggtaactacatcaccgacgtcgacggtaacacctacttggacttgtacgctcaaatctcctccatcgccttgggttacaacaacccagcattgatcaaagccgctcaatccccagaaatgatcagagcattggttgacagaccagccttgggtaacttcccttccaaggacttggacaagatcttgaagcaaatcttgaagtccgctccaaagggtcaggaccacgtctggtccggtttgtccggtgcagacgcaaacgaattggctttcaaggctgcattcatctactacagagctaagcaaagaggttacgacgcagacttctccgaaaaggaaaacttgtccgttatggacaacgacgcaccaggtgctccacacttggcagttttgtccttcaagagagctttccacggtagattgttcgcatccggttccactacctgttccaagccaatccacaagttggacttccctgctttccactggccacacgccgaatacccatcctaccagtaccctttggacgaaaactccgacgcaaacagaaaggaggacgaccactgcttggcaatcgttgaagaattgatcaagacctggtccatccctgttgctgcgttgatcatcgaaccaatccaatccgagggtggtgacaaccacgcctccaagtacttcttgcaaaagttgagagacatcaccttgaagtacaacgtcgtctacatcatcgacgaagtccaaactggcgttggcgcaaccggtaagttgtggtgtcacgaatacgcagacatccagcctccagtcgacttggtcaccttctccaagaagttccaatccgctggctacttcttccacgaccctaagttcatcccaaacaagccatacagacaattcaacacctggtgtggtgaaccagcaagaatgatcatcgcaggtgcaatcggtcaagagatctccgacaagaagttgaccgaacaatgctccagagtcggtgactacttgttcaagaagttggaaggtttgcaaaagaagtacccagagaacttccaaaacttgagaggtaagggtagaggcaccttcatcgcttgggacttgccaactggcgagaagagagacttgttgttgaagaagttgaagttgaacggctgtaacgttggtggctgtgctgttcacgcagtcagattgagaccttccttgaccttcgaagagaagcacgcagacatcttcatcgaagctttggctaagtccgtcaacgaattgtaa

SEQ ID NO: 142 - DNA, 1428 bp, Saccharomyces kluyveri
atgccatcctactccgttgcagaattgtactacccagacgaacctaccgaacctaagatctccacctcctcctacccaggtccaaaggcaaagcaagaattggaaaagttgtccaacgtcttcgacaccagagcagcttacttgttggcagactactacaagtcccgtggtaactacatcgttgaccaggacggtaacgtcttgttggacgtttacgctcaaatctcctccatcgccttgggttacaacaacccagaaatcttgaaggttgcaaagtccgacgcaatgtccgttgcattggccaaccgtccagcattggcttgtttcccatccaacgactacggtcaattgttggaagacggtttgttgaaggcagcaccacaaggtcaagacaagatctggaccgctttgtccggttccgacgcaaacgaaaccgccttcaaagcctgcttcatgtaccaagctgcgaagaagagaaacggtagatccttctccaccgaagaattggaatccgttatggacaaccaattgccaggcacctccgaaatggttatctgttccttcgaaaagggtttccacggtcgtttgttcggttccttgtccactaccagatccaagcctatccacaagttggacatcccagctttcaactggcctaaagccccattcccagacttgaagtacccattggaagaaaacaaggaagccaacaaggctgaagaatcctcctgtatcgaaaagttctcccaaatcgttcaagagtggcaaggtaagatcgctgcagttatcatcgaaccaatccagtccgagggtggcgacaaccacgcttcctccgacttcttccaaaagttgagagaaatcaccatcgaaaacggtatcttgatgatcgtcgacgaagttcaaaccggtgtcggtgctaccggcaagatgtgggcacacgaacactggaacttgtccaaccctccagacttggttaccttctccaagaagttccaagcagcaggtttctactaccacgacccaaagttgcaaccagaccagccattcagacagttcaacacctggtgtggtgacccatccaaggctttgatcgccaaggttatctacgaagaaatcgttaagcacgacttggtcaccagaactgccgaagtcggtaactacttgttcaacagattggaaaagttgttcgaaggtaagaactacatccagaacttgagaggtaagggtcaaggcacctacatcgctttcgacttcggcacctcctccgagagagactccttcttgtccagattgagatgtaacggtgcaaacgtcgctggttgcggtgactccgctgtcagattgagaccatccttgaccttcgaagagaagcacgcagacgtcttggtttccatcttcgacaagaccttgagacaattgtacggctaa

SEQ ID NO: 143 - DNA, 747 bp, Escherichia coli
atgatcgttttggtcaccggtgcaaccgcaggtttcggcgaatgtatcaccagaagattcatccagcagggtcacaaggttatcgctaccggtagaagacaagagagattgcaagaattgaaggacgagttgggtgacaacttgtacatcgctcaattggacgttagaaacagagcagctatcgaagaaatgttggcatccttgccagctgaatggtgcaacatcgacatcttggtcaacaacgctggtttggcattgggtatggaaccagctcacaaggctagtgttgaggactgggagaccatgatcgacaccaacaacaagggtttggtctacatgaccagagcagttttgcctggtatggttgaaagaaaccacggtcacatcatcaacatcggttccaccgctggttcctggccatacgctggcggtaacgtctacggtgctaccaaggctttcgttagacagttctccttgaacttgagaaccgacttgcacggcaccgctgttagagttaccgacatcgaaccaggtttggttggtggcaccgaattctccaacgtcagattcaagggcgacgacggtaaggctgaaaagacctaccaaaacaccgtcgctttgaccccagaagacgtttcagaggctgtttggtgggtcagtaccttgccagcacacgtcaacatcaacaccttggaaatgatgccagtcacccaatcctacgcaggtttgaacgttcacagacaataa

SEQ ID NO: 144 - DNA, 804 bp, Saccharomyces cerevisiae
atgtcccaaggtagaaaggcagcagaaagattggcaaagaagaccgtcttgatcaccggtgcgtccgctggtatcggtaaggctaccgcgttggagtacttggaagcatccaacggtgacatgaagttgatcttggcagcaagaagattggagaagttggaagaattgaagaagaccatcgaccaagaattcccaaacgctaaggtccacgttgcacaattggacatcacccaagcagagaagatcaagccattcatcgaaaacttgccacaagaattcaaggacatcgacatcttggtcaacaacgctggtaaggcgttgggttccgacagagttggtcaaatcgcaaccgaagacatccaagacgtcttcgacaccaacgtcaccgctttgatcaacatcacccaagctgttttgccaatcttccaagcgaagaactccggtgacatcgtcaacttgggttccatcgctggtagagacgcatacccaaccggctccatctactgcgcctccaagttcgctgtcggtgctttcaccgactccttgagaaaggaattgatcaacaccaagatcagagtcatcttgattgcccctggtttggtcgaaaccgaattctccttggttagatacagaggtaacgaagaacaagcaaagaacgtttacaaggacactaccccattgatggccgacgacgttgcagacttgatcgtttacgctacctccagaaagcaaaacaccgttatcgcagacaccttgatcttcccaaccaaccaagcatccccacaccacatcttcagaggttaa

SEQ ID NO: 145 - DNA, 420 bp, Streptomyces avermitilis
atgcttagaaccatgttcaaatccaagatccacagagcaaccgtcactcaagcagatttgcattacgttggttctgttactattgacgcagacttacttgatgcagccgatttacttcctggtgagcttgttcatattgttgatatcaccaatggtgcgcgtcttgaaacctatgtcattgagggtgaacgtggttccggtgtcgtcggtatcaatggcgcagctgcacacctcgtccatccaggtgacctggtcatcatcatttcttatgcacaggtctccgatgctgaagcccgtgccttaagaccaagagtcgttcacgtcgacagagataacagagttgtcgctttaggtgcagacccagcagagccagttccaggttccgatcaagctagatcaccacaggctgttaccgcctaa

SEQ ID NO: 146 - DNA, 420 bp, Streptomyces avermitilis
atgttaagaactatgtttaagtccaagattcacagagctaccgtcacccaagcagatttgcattacgtcggttccgttaccattgatgcagatttactcgatgcggcagacttgttacctggtgaactagttcacattgttgacattaccaatggtgctagattggaaacttacgtcattgaaggtgaaagaggtagtggtgtcgttggtatcaatggtgcagctgctcacttagttcacccaggtgacttagtcatcatcatttcatatgcacaagtttccgatgcggaagctagagcattaagaccaagagttgttcatgttgatagagacaacagagtcgttgcacttggtgcagatcctgctgaaccagttccaggttcagatcaagctaggtctccacaagcagttactgcataa

SEQ ID NO: 147 - DNA, 420 bp, Streptomyces avermitilis
atgttaagaactatgttcaagagtaagattcatagggctaccgttacccaggcagatctacattatgttggttctgttaccattgacgcagatttgttggatgcagcagacttgttaccaggtgaactcgttcacattgtcgatatcaccaacggtgccagactggaaacttatgtcattgaaggtgagagaggcagtggtgttgtcggcattaacggtgccgcagcacacttggttcatccaggtgacttggtcatcatcatttcttacgcacaagtctccgatgccgaagctagagcattgagacctagagtcgttcacgttgacagagacaatagagttgttgctcttggtgcagatccagctgagccagttccaggttccgatcaagcgagatctcctcaagctgttactgcataa

SEQ ID NO: 148 - DNA, 384 bp, Bacillus licheniformis
atgtatagaaccttgatgagtgcaaagcttcacagagcaagagtcactgaagcaaacttgaactacgttggttctgttactattgacgaagacttacttgatgcagtcggtatgatggcaaacgagaaagttcaaattgtcaacaataacaatggtgcgcgtcttgaaacctatatcattcctggtgaacgtggttccggtgtcgtctgcttgaatggcgcagctgcaaggctcgtccaagttggtgacgtcgtcatcattgtttcttatgcaatgatgtccgaagaagaagccaaaacacataagccaaaggtcgctgtcctcaatgaaagaaacgaaattgaggaaatgttaggtcaggaaccagcgagaaccatcttataa

SEQ ID NO: 149 - DNA, 384 bp, Bacillus licheniformis; identical to SEQ ID NO: 148

SEQ ID NO: 150 - DNA, 384 bp, Bacillus licheniformis
atgtacagaacgttaatgtctgccaagttacacagagcgagagttactgaagcaaatctcaactatgttggttcagttaccattgatgaggatctattggatgctgttggtatgatggcaaatgaaaaggttcaaatcgtcaataacaacaatggtgctagattagaaacttacatcattcctggtgaaagaggttcaggtgttgtttgcttaaacggtgctgccgcaagattagttcaagtcggtgatgttgttatcatcgtctcttatgctatgatgagtgaggaagaagctaagactcataagcctaaggttgccgttctcaatgagagaaacgaaatcgaagaaatgcttggccaagaacctgccagaaccatcctgtaa

SEQ ID NO: 151 - DNA, 384 bp, Bacillus licheniformis
atgtatagaacattgatgtctgcaaagttgcatagggctcgtgttactgaggcaaatctaaactacgtcggttccgtcacaatcgatgaagatctactcgatgccgttggtatgatggccaatgaaaaagttcaaattgtcaacaacaacaacggtgcaagattggagacctatatcattcctggtgaaagaggttcaggtgttgtttgtctgaacggtgctgctgcgaggttggtccaagtcggtgatgttgtcattatcgtttcttatgcaatgatgtcagaagaagaagctaagacccataagccaaaggttgctgttttgaacgaaagaaatgagattgaggaaatgttaggtcaagaaccagcaagaacaatcttataa

SEQ ID NO: 152 - DNA, 945 bp, Metallosphaera sedula
atgaccgaaaaggtctccgtcgtcggtgcaggcgtcatcggtgtcggttgggctaccttgttcgcttccaagggttactccgtctccttgtacaccgaaaagaaggaaaccttggacaagggtatcgaaaagttgcgtaactacgtccaagtcatgaagaacaactcccaaatcaccgaagacgtcaacaccgtcatctccagagtttcccctactaccaacttggacgaagccgttagaggtgcaaacttcgtcatcgaggctgtcatcgaagactacgacgctaagaagaagatcttcggttacttggactccgtcttggacaaggaagttatcttggcatcctccacctccggtttgttgatcaccgaagtccaaaaggctatgtccaagcacccagaaagagctgtcatcgcccacccatggaacccaccacacttgttgcctttggtcgaaatcgttccaggtgagaagacctccatggaagtcgttgagagaaccaagtccttgatggaaaagttggacagaatcgtcgtcgttttgaagaaggaaatcccaggtttcatcggtaacagattggcattcgctttgttcagagaagctgtctacttggttgacgagggtgtcgcaaccgtcgaggacatcgacaaggttatgactgccgctatcggcttgagatgggccttcatgggtccattcttgacctaccacttgggtggtggtgagggtggtttggaatacttcttcaacagaggtttcggttacggtgccaacgaatggatgcacaccttggctaagtacgacaagttcccatacaccggtgtcaccaaggccatccagcaaatgaaggaatactccttcatcaagggtaagaccttccaagagatctccaagtggagagacgaaaagttgttgaaggtctacaagttggtctgggaaaagtaa

SEQ ID NO: 153 - DNA, 1728 bp, Issatchenkia orientalis; identical to SEQ ID NO: 48

SEQ ID NO: 154 - protein, 575 aa, Issatchenkia orientalis; identical to SEQ ID NO: 49

SEQ ID NO: 155 - DNA, 1167 bp, Issatchenkia orientalis; identical to SEQ ID NO: 117

SEQ ID NO: 156 - protein, 388 aa, Issatchenkia orientalis; identical to SEQ ID NO: 118

SEQ ID NO: 157 - DNA, 1683 bp, Aedes aegypti
atgccagccaacggaatgttcgacgtcgctctgcaggtcatcgacgactccaacgtgtctagtggatcggacagtgctggtgtgtctgaagatgaagatgttcaactgttttgcagtaaagggaataccatagtcccgaagccgttgaaaaaatccatatcgaaaatcaaggatgaagagttcagcaaaaccgccaaagcaaacgagaaacgatacgcaagtcttccgagccgtgaacatcaccagcaattcttgaccgacttcctgtcggaagtgctgaacaatgccgttttcaacgctaccgaacgggctaacaaagttctgaactgggtggatccggagcagctcaagcgaaccttggacctggaactgaaggacgagcccgattcacatgagaagctgctggaactgaccagggccaccataaagcactcggtcaaaaccggacatccctacttcatgaaccaactgttctcgtccgtcgatccgtacgggttcgctggacagatccttaccgatgcgttgaaccccagtgtctacacgttcgaagtgtctccggtgttcgtcctgatggaggaagtggtgctcaaagaaatgagaaccatcgttggctacccggacggaaccggagatggcattttctgcccaggtggttcgatggctaacggctattccattagctgtgcccgcttcaaacacatgcccgatgtcaagacaaaaggattacattcacttccgcgcttggtaatcttcacatctgaagacgctcattattcggtgaaaaaattggcatcgttcatgggcatcggctcggacaacgtgtacccaatccatacggacgccatcggcaagatcagagtggatcatctagagtcggaaattctgcgcgccaaatcggagggagccgtgccgtttatggtgtcggccaccgcaggaacaacagtgatcggagcgtttgatccgctggagcagatcgcagatctgtgcaaaaagtacaacctctggatgcacgtggatgccgcctggggtggtggtgcacttatgtccaagaagtaccgatcgctgcttaaaggaatcgaacgatcggactcggtcacctggaacccacacaaattgctcgccgctccgcagcaatgctccaccttcctgacccgccacgagggaatcctatcggagtgccactcgaccaacgcgacctatctcttccagaaggacaaattctacgacacccagtacgacaccggcgataagcacatccagtgtggtcgccgtgccgacgtcctcaaattttggttcatgtggcgtgccaagggcacttccgggctggaacagcacatcgacaaggtgttcgagaatgcggagcacttcaccagcagtattaaatcgcgagaaggttttgaaatggtcgtcgagaatcccgagtgtaccaacgtgtgcttctggtacgtgccacctggattgcggaacgtaccacgtgacagcgcagagttcaccgaacggctgcacaaggttgcccccaaggtcaaggaacgcatgatgcgggaaggttcgatgatgatcacataccaaccgatccacgataagcccaacttcttccgattggtcctgcagaactcggccctggacaaatcggacatgaactacatcatcgatgaaatcgaacgacttgctgcagatttgtaa

SEQ ID NO: 158 - DNA, 1683 bp, Aedes aegypti
atgccagccaacggtatgttcgacgttgcattgcaagttatcgacgactccaacgtctcctccggttccgactccgctggtgtctccgaagacgaagacgtccaattgttctgttctaagggcaacaccatcgtcccaaagccattgaagaagtccatctccaagatcaaggacgaagaattctccaagaccgctaaggcaaacgaaaagagatacgcctccttgccatccagagagcatcaccagcaattcttgaccgacttcttgtccgaagttttgaacaacgcagttttcaacgctaccgaaagagcaaacaaggtcttgaactgggttgacccagaacaattgaagagaaccttggacttggaattgaaggacgaaccagactcccacgaaaagttgttggaattgaccagagcaaccatcaagcactccgttaagaccggtcacccatacttcatgaaccaattgttctcctccgtcgacccatacggtttcgctggtcaaatcttgaccgacgctttgaacccatccgtctacaccttcgaagtttccccagtcttcgttttgatggaagaagtcgttttgaaggaaatgagaaccatcgttggttacccagacggcaccggtgacggtatcttctgtccaggtggttccatggcaaacggttactccatctcctgtgcaagattcaagcacatgccagacgttaagaccaagggtttgcactccttgccaagattggtcatcttcacctccgaagacgcccactactccgtcaagaagttggcttccttcatgggtatcggctccgacaacgtctacccaatccacaccgacgcaatcggcaagatcagagtcgaccacttggaatccgaaatcttgagagccaagtccgaaggtgcggttcctttcatggtctccgctactgctggcactaccgttatcggtgcattcgacccattggaacaaatcgcagacttgtgcaagaagtacaacttgtggatgcacgtcgacgctgcttggggtggtggtgctttgatgtccaagaagtacagatccttgttgaagggtatcgaaagatccgactccgttacctggaacccacacaagttgttagccgcacctcaacaatgttccaccttcttgaccagacacgaaggtatcttgtccgaatgtcactccaccaacgcaacctacttgttccaaaaggacaagttctacgacacccaatacgacaccggtgacaagcacatccaatgtggtagaagggcagacgtcttgaagttctggttcatgtggcgtgccaagggcacctccggtttggaacaacacatcgacaaggttttcgaaaacgctgaacacttcacctcctccatcaagtccagagaaggtttcgaaatggttgttgagaacccagaatgtaccaacgtctgtttctggtacgtcccaccaggtttgagaaacgtccctagagactccgctgaattcaccgaaagattgcacaaggtcgcaccaaaggtcaaggaaagaatgatgagagaaggttccatgatgatcacctaccaacctatccacgacaagccaaacttcttccgtttggttttgcaaaactccgcattggacaagtccgacatgaactacatcatcgacgagatcgagagattggcagcagacttgtaa

SEQ ID NO: 159 - DNA, 1683 bp, Aedes aegypti
atgccagccaacggtatgttcgacgttgctttgcaagttatcgacgactccaacgtttcctccggttccgactccgcaggtgtttccgaagacgaagacgtccaattgttctgctccaagggtaacaccatcgtcccaaagccattgaagaagtccatctccaagatcaaggacgaggaattctccaagaccgctaaggcaaacgaaaagagatacgcgtccttgccttccagagaacatcaccagcaattcttgaccgacttcttgtccgaagtcttgaacaacgcagttttcaacgctaccgaaagagcaaacaaggtcttgaactgggttgacccagagcaattgaagagaaccttggacttggaattgaaggacgaaccagactcccacgaaaagttgttggaattgaccagggcaaccatcaagcactccgtcaagaccggtcacccttacttcatgaaccaattgttctcctccgtcgacccatacggtttcgctggtcaaatcttgaccgacgctttgaacccatccgtttacaccttcgaagtctccccagttttcgtcttgatggaagaggttgtcttgaaggagatgagaaccatcgtcggttacccagacggcaccggtgacggcatcttctgtccaggtggttccatggcaaacggttactccatctcctgtgcaagattcaagcacatgccagacgtcaagaccaagggtttgcactccttgccaagattggtcatcttcacctccgaagacgctcactactccgtcaagaagttggcttccttcatgggtatcggttccgacaacgtctacccaatccacaccgacgcaatcggtaagatcagagttgaccacttggaatccgaaatcttgagagctaagtccgaaggtgcagtccctttcatggtctccgcaaccgcaggcactaccgtcatcggtgcattcgaccctttggagcaaatcgcagacttgtgtaagaagtacaacttgtggatgcacgttgacgctgcttggggtggtggcgcattgatgtccaagaagtacagatccttgttgaagggtatcgagagatccgactccgtcacctggaaccctcacaagttgttagccgctccacagcaatgttccaccttcttgaccagacacgaaggtatcttgtccgaatgtcactccaccaacgcaacctacttgttccaaaaggacaagttctacgacacccaatacgacaccggtgacaagcacatccaatgcggtagaagggcagacgtcttgaagttctggttcatgtggcgtgcaaagggcacctccggtttggagcaacacatcgacaaggtcttcgaaaacgccgaacacttcacctcctccatcaagtcccgtgaaggtttcgagatggtcgtcgaaaacccagagtgcaccaacgtctgtttctggtacgtccctccaggtttgagaaacgtcccacgtgactccgctgaattcaccgagagattgcacaaggttgccccaaaggtcaaggaacgtatgatgagagagggttccatgatgatcacctaccaaccaatccacgacaagccaaacttcttcagattggttttgcagaactccgcattggacaagtccgacatgaactacatcatcgacgagatcgaaagattggctgccgacttgtaa

SEQ ID NO: 160 - DNA, 1683 bp, Aedes aegypti
atgcctgcaaacggtatgttcgacgtcgcattgcaagttatcgacgactccaacgtctcctccggttccgactccgctggtgtctccgaagacgaagacgtccagttgttctgttccaagggtaacaccatcgtccctaagccattgaagaagtccatctccaagatcaaggacgaagaattctccaagaccgcaaaggcaaacgaaaagagatacgcttccttgccatccagagagcatcaccagcaattcttgaccgacttcttgtccgaagttttgaacaacgcagtcttcaacgctaccgagagagccaacaaggtcttgaactgggtcgacccagaacaattgaagagaaccttggacttggaattgaaggacgaaccagactcccacgaaaagttgttggagttgaccagagctaccatcaagcactccgtcaagaccggtcacccttacttcatgaaccaattgttctcctccgtcgacccatacggtttcgcaggccaaatcttgaccgacgctttgaacccttccgtctacaccttcgaagtctccccagttttcgtcttgatggaagaagtcgttttgaaggagatgagaaccatcgttggttacccagacggcaccggtgacggcatcttctgtccaggcggttccatggcaaacggttactccatctcctgtgcacgtttcaagcacatgccagacgtcaagaccaagggtttgcactccttgccaaggttggtcatcttcacctccgaagacgcccactactccgttaagaagttggcatccttcatgggtatcggttccgacaacgtctacccaatccacaccgacgcaatcggtaagatcagggttgaccacttggaatccgaaatcttgagagctaagtccgaaggtgctgtcccattcatggtctccgcaaccgctggcactaccgtcatcggtgccttcgaccctttggaacaaatcgccgacttgtgcaagaagtacaacttgtggatgcacgttgatgctgcgtggggtggtggtgcgttgatgtccaagaagtacagatccttgttgaagggtatcgaacgttccgactccgtcacctggaacccacacaagttgttagcggcaccacaacagtgctccaccttcttgaccagacacgagggtatcttgtccgaatgccactccaccaacgctacctacttgttccagaaggacaagttctacgacacccaatacgacactggcgacaagcacatccagtgtggtagaagagcagacgttttgaagttctggttcatgtggagagctaagggcacctccggtttggaacaacacatcgacaaggtcttcgaaaacgccgaacacttcacctcctccatcaagtccagagaaggtttcgaaatggttgtcgaaaacccagaatgtaccaacgtttgtttctggtacgttccaccaggtttgaggaacgtcccaagagactccgcagagttcaccgaaagattgcacaaggtcgcacctaaggttaaggaaagaatgatgagagagggttccatgatgatcacctaccaacctatccacgacaagccaaacttcttcaggttggtcttgcaaaactccgcgttggacaagtccgacatgaactacatcatcgacgagatcgaaagattggcagcagacttgtaa

SEQ ID NO: 161 - DNA, 1683 bp, Aedes aegypti
atgcctgcaaacggtatgttcgacgtcgctttgcaagtcatcgacgactccaacgtctcctccggttccgactccgcaggcgtctccgaagacgaagacgttcaattgttctgttccaagggtaacaccatcgttccaaagccattgaagaagtccatctccaagatcaaggacgaagaattctccaagaccgctaaggcaaacgagaagagatacgcttccttgccatccagagaacatcaccaacaattcttgaccgacttcttgtccgaagttttgaacaacgctgtcttcaacgctaccgaaagagccaacaaggtcttgaactgggtcgacccagaacaattgaagagaaccttggacttggaattgaaggacgagccagactcccacgagaagttgttggaattgaccagagctaccatcaagcactccgtcaagaccggtcacccatacttcatgaaccagttgttctcctccgtcgacccatacggtttcgctggtcaaatcttgaccgacgcattgaacccttccgtttacaccttcgaagtttcccctgtcttcgtcttgatggaagaagtcgtcttgaaggaaatgagaaccatcgtcggttacccagacggcactggcgacggtatcttctgtcctggtggttccatggccaacggttactccatctcctgtgctagattcaagcacatgccagacgttaagaccaagggtttgcactccttgcctagattggtcatcttcacctccgaagacgctcactactccgttaagaagttggcctccttcatgggtatcggttccgacaacgtctacccaatccacaccgacgcaatcggtaagatcagagtcgaccacttggagtccgaaatcttgagagcaaagtccgaaggcgcagtcccattcatggtctccgcgaccgcaggcactaccgtcatcggtgctttcgacccattggaacagatcgcagacttgtgtaagaagtacaacttgtggatgcacgtcgatgccgcttggggtggtggcgctttgatgtccaagaagtacagatccttgttgaagggcatcgagagatccgactccgttacctggaacccacacaagttgttggctgctccacaacaatgttccaccttcttgaccagacacgagggtatcttgtccgaatgtcactccaccaacgctacctacttgttccaaaaggacaagttctacgacacccaatacgacaccggtgacaagcacatccaatgtggtagaagggcagacgtcttgaagttctggttcatgtggagggcaaagggcacctccggtttggagcaacacatcgacaaggtcttcgaaaacgctgaacacttcacctcctccatcaagtccagagaaggcttcgaaatggtcgttgaaaaccctgaatgtaccaacgtctgcttctggtacgtcccaccaggtttgaggaacgtccctagagactccgctgaattcaccgaacgtttgcacaaggtcgcaccaaaggttaaggaaaggatgatgagagaaggttccatgatgatcacctaccaaccaatccacgacaagccaaacttcttcagattggttttgcaaaactccgcattggacaagtccgacatgaactacatcatcgacgaaatcgaaagattggcagcagacttgtaa

SEQ ID NO: 162 - protein, 560 aa, Aedes aegypti
MPANGMFDVALQVIDDSNVSSGSDSAGVSEDEDVQLFCSKGNTIVPKPLKKSISKIKDEEFSKTAKANEKRYASLPSREHHQQFLTDFLSEVLNNAVFNATERANKVLNWVDPEQLKRTLDLELKDEPDSHEKLLELTRATIKHSVKTGHPYFMNQLFSSVDPYGFAGQILTDALNPSVYTFEVSPVFVLMEEVVLKEMRTIVGYPDGTGDGIFCPGGSMANGYSISCARFKHMPDVKTKGLHSLPRLVIFTSEDAHYSVKKLASFMGIGSDNVYPIHTDAIGKIRVDHLESEILRAKSEGAVPFMVSATAGTTVIGAFDPLEQIADLCKKYNLWMHVDAAWGGGALMSKKYRSLLKGIERSDSVTWNPHKLLAAPQQCSTFLTRHEGILSECHSTNATYLFQKDKFYDTQYDTGDKHIQCGRRADVLKFWFMWRAKGTSGLEQHIDKVFENAEHFTSSIKSREGFEMVVENPECTNVCFWYVPPGLRNVPRDSAEFTERLHKVAPKVKERMMREGSMMITYQPIHDKPNFFRLVLQNSALDKSDMNYIIDEIERLAADL

SEQ ID NO: 163 - protein, 563 aa, Culex quinquefasciatus
MPTNGMFDVALQVIEDANLSSGSDSAGVSEDEDVQLFCTTGNVVSSKPLKKPSLKPVTTVKDEDQNKMKTNAKRYASLPNREQHQRFLTDFLSEVLNNAIFNATDRSNKVLNWVDPEELKRSIDLSLKAEPDSDEKLLELARATIDHSVKTGHPYFMNQLFSSVDVYGFAGQCLTDALNPSVYTFEVSPVFVLMEEVVLKEMRTIVGFPGGVGDGIFCPGGSMANGYAISCARFKHMPDVKTKGLHSLPRLVIFTSEDAHYSIKKLASFMGIGSDNVYPIRTDAVGKIQPDHLEAEILRAKSEGALPFMVSATAGTTVIGAFDPLEQIADLCQKYNLWMHVDAAWGGGALMSKKYRTLLKGVERADSVTWNPHKLLAAPQQCSTFLTRHEGILSGCHSTNATYLFQKDKFYDTQYDTGDKHIQCGRRADVLKFWFMWRAKGTSGFEQHIDKVFENAEYFTNSIKARPGFEMVIENPECTNVCFWYVPPGLRQVPRDSAEFGERLHKVAPKVKERMMREGSMMITYQPIHDKPNFFRLVLQNSGLDKSDMNYIIDEIERLASDL

SEQ ID NO: 164 - protein, 567 aa, Anopheles gambiae
MPANGVCSVGLEVIEDNATYASGSDSAGVSEDEDVQQLFVSGADRVTSVLPKKSDIRKASQVDEQAAAAAAAAVSEKRYASLPNREQHQQFLTQFLTEVLNSAVFNATDRANKVLNWVDPEELQRTLDLALKDEPDTHEKLLELTRATIRHSVKTGHPYFMNQLFSSVDPYGFAGQVLTDALNPSVYTYEVSPVFVLMEEVVLREMRTIVGYPDGEGDGIFAPGGSMANGYAISCARHKFMPDIKTKGLHALPRLVIFTSEDAHYSVKKLASFMGIGSDNVYAIKTDNVGKIRVEHLESEILRAKSEGALPFMVSATAGTTVIGAFDPLEQIADLCAKYNLWMHVDAAWGGGALMSKKYRTLLKGIERSDSVTWNPHKLLAAPQQCSTLLTRHRNILAEAHSTNATYLFQKDKFYDTRYDTGDKHIQCGRRADVLKFWFMWRAKGTAGFEAHIDKVFENAEHFTSSIKARPGFEMVIEQPECTNVCFWYVPPGLRGVPRDSAEYRDRLHKVAPKVKERMMKDGSMMITYQPIHDKPNFFRLVLQNSSLDKSDMNYIIDEIERLGKDL

SEQ ID NO: 165 - protein, 540 aa, Tribolium castaneum
MPATGEDQDLVQDLIEEPATFSDAVLSSDEELFHQKCPKPAPIYSPVSKPVSFESLPNRRLHEEFLRSSVDVLLQEAVFEGTNRKNRVLQWREPEELRRLMDFGVRSAPSTHEELLEVLKKVVTYSVKTGHPYFVNQLFSAVDPYGLVAQWATDALNPSVYTYEVSPVFVLMEEVVLREMRAIVGFEGGKGDGIFCPGGSIANGYAISCARYRFMPDIKKKGLHSLPRLVLFTSEDAHYSIKKLASFQGIGTDNVYLIRTDARGRMDVSHLVEEIERSLREGAAPFMVSATAGTTVIGAFDPIEKIADVCQKYKLWLHVDAAWGGGALVSAKHRHLLKGIERADSVTWNPHKLLTAPQQCSTLLLRHEGVLAEAHSTNAAYLFQKDKFYDTKYDTGDKHIQCGRRADVLKFWFMWKAKGTSGLEKHVDKVFENARFFTDCIKNREGFEMVIAEPEYTNICFWYVPKSLRGRKDEADYKDKLHKVAPRIKERMMKEGSMMVTYQAQKGHPNFFRIVFQNSGLDKADMVHLVEEIERLGSDL

SEQ ID NO: 166 - protein, 600 aa, Attagenus smirnovi
  misc_feature (36)..(36): Xaa can be any naturally occurring amino acid
MVTIWPTSPQGKVIAARPARDPSTSYNGGFAAQYRXFVIQSCKQLNFSSRGITNHARQRRSEKYNLEEDVTDEATSNSDHSPSEDDDLYVRHTNGFNIKPSKPIIEPRKFATFPSVPDKEHHEDFIKACVDILLKEAVFDGTNRKNRVLEWHSPEELKKLFDFNLRKSGSSHEELTRLIKDTIHYSVKTGHPYFVNQLFSSVDLYGLVGQWLTDALNPSVYTYEVSPVFTLMEETVLREMRTIVGFEDGKGDGIFCPGGSMANGYAISCARYKFKPDIKDTGLHGLPRLVLFTSEDAHYSIKKMASLLGIGSNNVYLIKTDELGRMSVPHLVEQIERVHKEGGAPFMVSATAGTTVLGAFDPIQELADVCERYNLWLHVDAAWGGGALISQRHRHLLTGINRADSVTWNPHKLLTAPQQCSTLLLRHEGILAGAHSANAAYLFQKDKFYDTRYDTGDKHVQCGRRADVLKFWFMWKAKGTIGFEQHIDKVFDNAKFFSDNIRHRPGFRMVLEDPECTNICFWYVPPSMRGCEDQQDFNERLHKVAPKIKERMMKEGSMMVTYQPQKSLPNFFRIVFQNSGLERSDMLHLIKEFERLGHDL

SEQ ID NO: 167 - protein, 537 aa, Acyrthosiphon pisum
MPIVMPAATVPTDYATARPVELMVTASTLDETPCGKGPMMESLSAAVCGYKSAPNAADHEAFVRDAVRLMLEQAVFRGTDRRRPVLNWKSPEELQAAFDFALDRSPTTHGHLLNLIEDTIEHSVKTGHPYFINQLFSSVDPYGLIGQWLTDALNPSVYTFEVAPVMTIMEETVLTEMRKFLGYPDGKGDGIFCPGGSIANGYAINCARFSAFPEVKTRGMHGLPRLVVYTSADAHYSIKKLCAFEGIGSDNLYLINTDAKGKMDVSHLRQQIQRTLEEKAVPIMVSATAGTTVLGAFDPIAEIADVCHEYGIWLHVDAAWGGGALVSKKHKHLLTGIDRADSVTWNPHKMLTAPQQCSTFLTKHERVLTESNSSCAQYLFQKDKFYDTTYDTGDKHIQCGRRADVFKFWFMWKAKGTDGLEAHVDENFDNAKYFTEMIRNRAGFKLVLEEPEYTNITFWYIPPSLRGRQNEPDFKNKLHKVAPRIKERMMKEGTMMITYQPSDDLPNFFRLVLQNSSLDQNDMDYFVNEIERLGSDL

SEQ ID NO: 168 - protein, 576 aa, Drosophila sechellia
MLASENFPTHHFKESIFKPYSTTSGDDLASVTPLTATAALVASTPSPADSTSAVAFEQASKMLATAANNNNNNNNNNITSTKDDLSSFVASHPAAEFEGFIRACVDEIIKLAVFQGTNRSSKVVEWHEPAELRQLFDFQLREQGESQDKLRELLRETIRFSVKTGHPYFINQLYSGVDPYALVGQWLTDALNPSVYTYEVAPLFTLMEEQVLAEMRRIVGFPNGGQGDGIFCPGGSIANGYAISCARYRHSPESKKNGLFNAKPLIIFTSEDAHYSVEKLAMFMGFGSEHVRKIATNEVGKMRLSDLEEQVKQCLENGWQPLMVSATAGTTVLGAFDDLAGISELCKKYNMWMHVDAAWGGGALMSKKYRHLLNGIERADSVTWNPHKLLAASQQCSTFLTRHQQVLAQCHSTNATYLFQKDKFYDTSFDTGDKHIQCGRRADVFKFWFMWKAKGTQGLEAHVEKVFRMAEFFTAKVRERPGFELVLESPECTNISFWYVPPGLREMERNREFYDRLHKVAPKVKEGMIKKGSMMITYQPLRQLPNFFRLVLQNSCLEESDMVYFLDEIESLAQNL

SEQ ID NO: 169 - protein, 575 aa, Drosophila melanogaster
MLASENFPTHHFKESIFKPYSTTSGDDLASVSPLTATAALVASTSSPADSTSTVAFEQASKMLANAANNNNNNNNNITSTKDDLSSFVASHPAAEFEGFIRACVDEIIKLAVFQGTNRSSKVVEWHEPAELRQLFDFQLREQGESQDKLRELLRETIRFSVKTGHPYFINQLYSGVDPYALVGQWLTDALNPSVYTYEVAPLFTLMEEQVLAEMRRIVGFPNGGQGDGIFCPGGSIANGYAISCARYRHSPESKKNGLFNAKPLIIFTSEDAHYSVEKLAMFMGFGSDHVRKIATNEVGKMRLSDLEKQVKLCLENGWQPLMVSATAGTTVLGAFDDLAGISEVCKKYNMWMHVDAAWGGGALMSKKYRHLLNGIERADSVTWNPHKLLAASQQCSTFLTRHQQVLAQCHSTNATYLFQKDKFYDTSFDTGDKHIQCGRRADVFKFWFMWKAKGTQGLEAHVEKVFRMAEFFTAKVRERPGFELVLESPECTNISFWYVPPGLREMERNREFYDRLHKVAPKVKEGMIKKGSMMITYQPLRQLPNFFRLVLQNSCLEESDMVYFLDEIESLAQNL

SEQ ID NO: 170 - protein, 508 aa, Danaus plexippus
MRVDSKIIVKKETQDENLYQSLAERSKHEEFLRKAVDLLVERVVFGRSTRSSKVVEWAAPDEIKKAIDLKPRLGPASHDELLAFMANVARYSVNTGHPYFVNQLFSSVDPYGLVGQWLTDALNPSVYTFEVAPVFTLMEEEVLREMRKIVGWPEGEGDGIFCPGGSIANGYAISCARHHFYPEVKYKGVHAVPKLVLFTSELAHYSTKKMAAFMGIGSDNCVNIKTDDVGKMNIVDLEMKIKIAIDNKCTPFMVTATSGTTVFGAFDPLVAISDLCKKYNLWLHVDAAWGGGALMSKKHRHLLNGIELADSVTWNPHKLLAAPQQCSTFLTRHKKVLSEGHSSNAKYLFQKDKFYDTSYDTGDKHIQCGRRADVLKFWFMWKAKGTEGFEKHVDKLFDNAKYFLDHIKQREGFQLVIAEPQCTNIMFWYIPKCLRGCENDADYYERLHKVAPKIKERMIKEGSMMVTYQPQGDLVNFFRIVFQNSALDHKDMVYFANEFERLGSDMIV

SEQ ID NO: 171 - protein, 570 aa, Drosophila yakuba
MLASENFPTHHFKESIFKPYSTSGDDLASATPLTAAAALVATTSSPADSSSAVAFETASKMLATNNNNNNNITSSKDDLSSFVASHPAAEFEGFIRACVDEIIKLAVFQGTNRSSKVVEWHEPAELRQLFDFQLREKGESQDKLRELLRETIRFSVKTGHPYFINQLYSGVDPYALVGQWLTDALNPSVYTYEVAPLFTLMEEQVLAEMRRIVGFPNGGQGDGIFCPGGSIANGYAISCARYRHSPESKKNGLFNAKPLIIFTSEDAHYSVEKLAMFMGFGSEHVRKIATNEVGKMRLSDLEEQVKQCLENNWQPLMVSATAGTTVLGAFDDLAGISELCKKYNMWMHVDAAWGGGALMSKKYRHLLSGIERADSVTWNPHKLLAASQQCSTFLTRHQQVLAQCHSTNATYLFQKDKFYDTSFDTGDKHIQCGRRADVFKFWFMWKAKGTQGLEAHVEKVFRMAEFFTAKVRERPGFELVLESPECTNISFWYVPPGLREMERNREFYDRLHKVAPKVKEGMIKKGSMMITYQPLRQLPNFFRLVLQNSCLEESDMVYFLDEIESLAQNL

SEQ ID NO: 172 - protein, 572 aa, Drosophila erecta
MLASENFPTHHFKESIFKPYSTSGDDLASVTPLTAAAALVASTSSPADSSSAVAFETASKMLTTTNSNNNNNNTTSAKDDLSSFVASHPAAEFEGFIRACVDEIIKLAVFQGTNRSSKVVEWHEPAELRQLFDFQLREKGESQDKLRELLRETIRFSVKTGHPYFINQLYSGVDPYALVGQWLTDALNPSVYTYEVAPLFTLMEEQVLAEMRRIVGFPNGGQGDGIFCPGGSIANGYAISCARYRHSPESKKNGLFNAKPLIIFTSEDAHYSVEKLAMFMGFGSEHVRKIATNEVGKMRLSDLEEQVKQCLENDWQPLMVSATAGTTVLGAFDDLAGISDVCKKYNMWMHVDAAWGGGALMSKKYRHLLSGIERADSVTWNPHKLLAASQQCSTFLTRHQQVLAQCHSTNATYLFQKDKFYDTSFDTGDKHIQCGRRADVFKFWFMWKAKGTQGLEAHVEKVFRMAEFFTAKVRERPGFELVLESPECTNISFWYVPPGLREMERNREFYDRLHKVAPKVKEGMIKKGSMMITYQPLRQLPNFFRLVLQNSCLEESDMVYFLDEIESLAQNL

SEQ ID NO: 173 - protein, 508 aa, Papilio xuthus
MPADSNLIVAGEAIKESLFQSLPERSKHEEFIRRAVDLLVERVVFGRSQRSAKVVEWAAPDEIKSVIDLKPREGPVSHDELLAIMADVARYSVNTGHPYFVNQLFSTVDPYGLIGQWLTDALNPSVYTYEVAPVFTLMEEEVLREMRAIVGWKDGDGDGIFCPGGSISNGYAISCARHHFYPDVKSKGVYAVPKLVLFTSELAHYSTKKMACFMGIGSDNCIMIKTDELGKMDVGDLEIKISEAINSGSTPFMVTATAGTTVFGAFDPLIPISDLCKKYNLWLHVDAAWGGGALMSKKHRHLLKGIELADSVTWNPHKLLAAPQQCSTFLVRHKNVLKEGHSSNAKYLFQKDKFYDTSYDTGDKHIQCGRRADVLKFWFMWKAKGSDGFEKHIDKLFDNAKYFLDHIKQRAGFKLVLENPECTNIMFWYVPNCLRGCENDPNYRERLHKVAPKIKERMIKEGSMMVTYQPQGNLVNFFRIVFQNSALDHKDMVYFANEFERLGSDIIV

SEQ ID NO: 174 - protein, 589 aa, Drosophila persimilis
MLASETFPAHRFKESIFKPYSTSGSASVDDLASVNKTLTSAATTSSSPDTHAAVDIAPTASSVEFETARKMLTNNSSSSSNNSNNNNNNNNNDAKDDISGFVASHPAAPFEGFIRACVDEIIKLAVFQGTNRSTKVVEWHEPAELRQLFDFQLRDKGEPQEKLRELLRETIRFSVKTGHPYFINQLYSGVDPYALVGQWLTDALNPSVYTYEVAPLFTLMEEQVLAEMRRIVGFPNGGKGDGIFCPGGSIANGYAISCARYTYAPESKKNGLFNAKPLIIFTSEDAHYSVEKLAMFMGFGSEHVVKIATNEVGKMRLSDLEDQVRRCLDNGWQPLMVSATAGTTVLGAFDDLTGIGDLCRKYNMWMHVDAAWGGGALMSKKYRHLLNGIERADSVTWNPHKLLAASQQCSTFLTRHQLVLGQCHSTNAAYLFQKDKFYDTSYDTGDKHIQCGRRADVFKFWFMWKAKGNLGLESHVEKVFRMAEFFTAKVRERPGFELVLESPECTNISFWYVPPSLRTMERDREFYDKLHKVAPKVKERMIKKGSMMITYQPLRQLPNFFRLVLQNSCLEESDMIYFLDEIESLAKNL

SEQ ID NO: 175 - protein, 511 aa, Bombyx mori
MPADSDLIVAEREDLGIDRTLYKSLSERSKHEDFIRRAVDLLVERVVFGRSLRTSKVVEWAVPSEIKKAIDLKPRDGPISHDELLGLMADVARYSVNTAHPYFVNQLYSSVDPYGLVGQWLTDALNPSVYTYEVAPVFTLMEEEVLKEMRVLVGWKDGEGDGIFCPGGSIANGYAISCARFHFYPEIKTKGVYAVPKLTLYTSELAHYSTKKLAAFMGIGDENCVLIKTDKYGKIDVEDLEAKIVEGIEEGAAPFLVTATAGTTVFGAFDPLVPIAALCKKYNLWLHVDAAWGGGALMSKKHRHLLNGIELADSVTWNPHKLLAAPQQCSTFLIRHKNVLKEGHSCNAKYLFQKDKFYDTSYDTGDKHIQCGRRADVLKFWFMWKAKGSDGFENHIDTLFDNARFFLEQIRNREGFELVIEKPECTNIMFWYVPRCLRGCENESDYRERLHKVAPKIKELMIKEGSMMVTYQPQGDLVNFFRIVFQNSALDHKDMIYFVNEFERLGRDILV

SEQ ID NO: 176 - protein, 578 aa, Drosophila ananassae
MLASKNYPTHHFKESIFKPYSTSGDDLASVNTLTASAASAAMVATTSSSADTVAVDFENARRMLATNGGIASNGNNNNNVLDSKDSLSGFVASHPAAQFDGFIRACVDEIIKLAVFQGTNRSSKVVEWHEPAELRQLFDFQLREKGESQDKLRELLRETIRFSVKTGHPYFINQLYSGVDPYALVGQWLTDALNPSVYTYEVAPLFTLMEEQVLAEMRRIVGFPNGGQGDGIFCPGGSIANGYAISCARYKYTPESKKNGLFNAKPLIIFTSEDAHYSVEKLAMFMGFGSEHVRKIATNEVGKMRVEDLENQIKMCLENNCQPLMVSATAGTTVLGAFDDLVGISELCKKYNMWMHVDAAWGGGALMSKKYRHLLNGIERADSVTWNPHKLLAASQQCSTFLTPHQQILAQCHSTNATYLFQKDKFYDTSFDTGDKHIQCGRRADVFKFWFMWKAKGSQGLEAHVEKVFRMAEFFTAKVRERPGFELVLDQPECTNISFWYVPPSLRQMERNREFYDRLHKVAPKVKEGMIKKGSMMITYQPLRQLPNFFRLVLQNSCLEESDMLYFLNEIESLAQNL

SEQ ID NO: 177 - protein, 580 aa, Drosophila mojavensis
MLASENFQAHLYNRSSIYKPYNEELASMAKQLTTATADAAGIDAAQAAVDYGSPSKQMLGSNNGSSSGSSNKTSSANSNNNNNNVANGLSSFVASHPSAEFEGFIRACVDEIIQLAVLQGTNRSSKVVEWHEPAELRKLFDFELRDQPDSPDKLRQLLRETIRFSVKTGHPYFINQLYSGVDPYALIGQWLTDALNPSVYTYEVAPVFTLMEEQVLGEMRRIVGFPNNGQGDGIFCPGGSIANGYAISCARYQYAPESKKNGLFNAKPLVIFTSEDAHYSVEKLAMFMGFGSEHVRKIATNELGKMRLSDLEQQIQFCLDNNWQPLMVSATAGTTVLGAFDDLLGISELCRKHNMWMHVDAAWGGGALMSKKYRQLLNGIERADSVTWNPHKLLSASQQCSTFLTRHTQILGQCHSTNAAYLFQKDKFYDTSFDTGDKHIQCGRRADVFKFWFMWKAKGTKGFEAHVEQVFEMSEYFTNKLRERPGFELVLDKPECTNITFWYVPPSLRQMERNQEFYDKLHKVAPKIKEAMIKKGSMMITYQPLRKLPNFFRLVLQNSCLDESDMLYFLNEIETLGQKL

SEQ ID NO: 178 - protein, 588 aa, Drosophila grimshawi
MLASKTFPTHHFKKSIYTTYNGASAPTNVEDLANVAKTLTTTTSSSSDSTVVEANTSPVEFSTPSKMLSSTSTTTTTTTNNNNNNNSNNNNNIVNGLSSFVASHPAAEFEGFIRACVDEIIHLAVFQGTDRASKVVEWHEPAELRKLFDFELREKGESQEKLRQLMRETIRYSVKTGHPYFINQLYSGVDPYALVGQWLTDALNPSVYTYEVAPVFTLMEEQVLAEMRRIVGFPDNGHGDGIFCPGGSIANGYAISCARYNYAPESKKNGLFNAKPLIIFTSEDAHYSVEKLAMFMGFGSENVRKIATNEVGKMRLSDLEEQIQLCLDNNWQPLMVSATAGTTVLGAFDDLVGISELCRKHNMWMHVDAAWGGGALMSKKYRHLLNGIERADSVTWNPHKLLSASQQCSTFLTRHAQILGQCHSTNAAYLFQKDKFYDTSFDTGDKHIQCGRRADVFKFWFMWKAKGSKGFEAHVEQVFEMSEFFTAKLRERPGFELVLDHPECTNITFWYVPPSLRHMEHNQEFYDKLHKVAPKIKEAMIKKGSMMITYQPLRKLPNFFRLVLQNSCLEESDMLYFINEIESLGQNL

SEQ ID NO: 179 - protein, 461 aa, Biston betularia
SQRSAKVVEWAAPEEIKKAIDLKPRDGPASHDQLLGLMADVARYSVNTGHPYFVNQLFSSVDPYGLIGQWLTDALNPSVYTFEVAPVFTLMEEEVLKEMRSLVGWKNGDGDGIFCPGGSIANGYAISCARFYYYPDIKTKGVYAVPRLVLFTSELAHYSTKKMAAFMGIGSDNCILVKADKLGKMDAEDLEVKINEALDDGATPFLVTATAGTTVYGAFDPLAQISSLCKKYNLWLHVDAAWGGGALMSKKHRHLLTGIELADSVTWNPHKLLAAPQQCSTFLIKHKNVLKDGHSSNAKYLFQKDKFYDTSYDTGDKHIQCGRRADVLKFWFMWKAKGSEGFEQHIDTLFDNAKHFVYLIRNREGYRLVIEEPECTNIMFWYIPKCLRGCENEPDYKERLNKVAPKIKERMIKEGSMMVTYQPQGDLANFFRIVFQNSALDHKDMVYFANEFERLGRDIVV

SEQ ID NO: 180 - protein, 583 aa, Drosophila willistoni
MLASENFPTHHFKESIFKPYNATTSAANAAAAATVEDLANVAKTLTSKSTTSSSVASDAAATVSLMGAVDIETARKMLANNNVNINNNNNNNINNNNSKDTAEFESFLRGCIDEIIKLAVVEGTNRSSKVVEWHEPSELRQIFDFQLREKGESQDKLRELLRETIRFSVKTGHPYFINQLYSGVDPYALVGQWLTDSLNPSVYTYEVAPVFTLMEEEVLAEMRRIVGFPDNGLGDGIFCPGGSIANGYAISCARYKYAPESKKNGLFSGKPLIIFTSEDAHYSVEKLAMFMGFGSEHVRKIATNEVGKMRLSDLEQQIQLCLDNNWQPLMVSATAGTTVLGAFDDLVGISELCRKHNMWMHVDAAWGGGALMSKKYRHLLNGIERADSVTWNPHKLLAASQQCSTFLTRHQQILGQCHSTNATYLFQKDKFYDTSYDTGDKHIQCGRRADVFKFWFMWKAKGSEGLRAHVEQVFRMSEYFTQQVRERPGFELVLESPECTNISFWYIPPSLRHMERNQEFYDKLHKVAPKIKEGMIKKGSMMITYQPLRRLPNFFRLVLQNSCLEESDMLYFLNEIESLGHQL

SEQ ID NO: 181 - protein, 548 aa, Apis mellifera
MPANEETLSMTSDQIRNNLLGKACDDSMQNNFDCESSGDDEEDYQNDCSRSIVKENFKEVCNYKSLPVREIHKKFMKSFVNLLLEEAVFEGTLRRNKVVEWIEPTTLHSIIDLKLSDQGCSYETLLTLAHNVIKYSVKTGHPRFINQLYSSVDPYGLLGQWLTDALNPSVYTYEVSPVFSLMEEEILREMRKIVGWKDGRSEGIFCPGGSIANGYAINLARYYKFPQSKELGLFNTGRLIIFTSRDAHYSVKKLSAFLGIGTENVYEVKTDDKGKMCITDLKIQIKKALEEDAIPLMVSATAGTTVLGAFDPLKNIAAICKNYNLWFHVDAAWGGGALMSKKYKYLLDGIELADSVTWNPHKLLAAPQQCSTLLLRHEGLLQDAHGSKASYLFQPDKFYDTSFDSGDKHIQCGRRADVLKFWFMWKAKGTRGLEKHVDRVFKLARYFTNYIKHREGFKLILEPECTNVCFWYVPPSKRQLQNEELLKALQKIGPAVKERMMKKGSMLITYQPLRELPNFFRLVLQNSGLTETDMRFFAEEIERLAIDL

SEQ ID NO: 182 - protein, 586 aa, Drosophila virilis
MLASETFPTHHFKNSIYKPYNGASSAPDVEDLASMAKTLTTTTLSSSDAAVIDVVKTTVEYGNPNKMLNSSVSSSSNSNNKNNNIKNTNGNVNGLASFVASHPAAEFEGFIRACVDEIIKLAVFQGTNRSSKVVEWHEPAELRKLFDFELREKGESPDKLRQLLRETIRFSVKTGHPYFINQLYSGVDPYALVGQWLTDALNPSVYTYEVAPVFTLMEEQVLAEMRRIVGFPNNGHGDGIFCPGGSIANGYAISCARYKYAPESKKNGLFNAKPLIIFTSEDAHYSVEKLAMFMGFGSEHVRKIATNELGKMRLSDLEDQIQLCLDNNWQPLMVSATAGTTVLGAFDDLVGISELCRKHNMWMHVDAAWGGGALMSKKYRQLLNGIERADSVTWNPHKLLSASQQCSTFLTPHAQILGQCHSTNAAYLFQKDKFYDTSFDTGDKHIQCGRRADVFKFWFMWKAKGSKGFEAHVEQVFEMSEYFTAKLRERPGFELVLEKPECTNITFWYVPPSLRQMERNQEFFDKLHKVAPKIKEAMIKKGSMMITYQPLRKLPNFFRLVLQNSCLEESDMLYFLNEIEDLGQNL

SEQ ID NO: 183 - protein, 547 aa, Nasonia vitripennis
MPAHEETQLQEGSAIEALERPRSADSEKHSRLDYEREEEAHQIGEDSDEGYAMDNFNEEGFFCSLPGRESHEKFIRDAVEMILREAVFKGTSRKNRVVEWIEPATLPSKIDLPPRKTGESHEALLRLLDSVIRYSVKTGHPHFVNQLYSSVDPYGLVGQWLTDALNPSVYTYEVSPVFSLMEEAVLKEMRAIVGWQNGEGDGIFCPGGSMANGYAINLARHWMFPIVKEQGLTAVPRLVVFTSEDAHYSVKKLAAFLGIGIANVYSVKVDESGKMCVSDLRAQIDRAIQEGARPLMVSATAGTTVLGAFDPLRSIAELCREHNMWFHVDAAWGGGALVSPKHRHLLDGVELADSVTWNPHKLLAAPQQCSTLLTRHKGLLQSAHGCKATYLFQQDKFYDTSYDFGDKHVQCGRRADVLKFWLMWKAKGTDGLEKHVDRVFQLSRYFVGIIRNRPGWQLLFEPECTNVCFRYVPPSKRHLNGQDLFQALHKVAPLVKERMVKTGSMLITYQPIREQANFFRLVLQNSGLTEADMHFFVEEIERLSEDL

SEQ ID NO: 184 - protein, 508 aa, Bicyclus anynana
MPADSNIIVAVEEKKEDGLFQSLTERSKHEDFIRRAVDLLVERVVFGRASRTSKVVEWSAPEDIKQAIDLKVRDGPASHEELLAFMADVARYSVNTAHPYFVNQLFSSVDPYGLIGQWLTDALNPSVYTFEVAPVFTLMEEEVLREMRSIVGWADGEGDGIFCPGGSIANGYAISCARSYFYPEIKNKGVYAVPKLVIFTSELAHYSTKKMAVFMGIGSDNCILVKADENGRMDVNDFERKINEAIEAGATPFLVTSTSGTTVYGAFDPIVPISNICKKYNLWLHVDAAWGGGALMSRKHRNLLNGIEADSVTWNPHKLLAAPQQCSTFLLKHKNVLKEAHSSNAQYLFQKDKFYDTSYDTGDKHIQCGRRADVLKFWFMWKAKGSEGFEKHVEKLFDNANYFLEHIRQREGFRLVIPKPECTNIMFWYIPKCLRSCENEPNYYERLHKVAPKIKERMIKEGSMMVTYQPQGNLVNFFRIVFQNSALDHKDMIYFANEFERLGSDIVV

SEQ ID NO: 185 - protein, 543 aa, Harpegnathos saltator
MPANEDTSNESLERIEPGRISPSLSQRKMSGGLQNLASSLLPGATVDDDLESSRVEERNFRSIPRRDIHEKLFRDFFELVLQQAVFQSTSGKERVVEWMNPSDLRSVVDFSLPAEGVSHEELLALTRNVIKYSVKTGHPHFVNQLFSSLDPYGLLGQWLTDALNPSVYTYEVSPVFSLMEEDVLREMRRIIGWKGGEGLFCPGGSMANGYAINLARHHRYPNMKQTGLSQMPRLVIFTSEDAHYSVKKLAAFLGIGYDNVYSVKVDSRGKMLVSDLEAQIARATREGAVPLMVSSTAGTTVLGAFDPLKDIAEVCRKHRLWFHVDAAWGGGALVSRTYRRLLDGVELADSITWNPHKLLAAPQQCSTLLLRHEGLLQSAHGCGASYLFQNDKFYDSSYDCGDRHVQCGRRADVVKFWYMWKAKGTRGLEEHVDHVFALSRYFADLVRTRDGWHLLAEPECTNVCFRYIPPSMRDLAGRQLDQAIHKVAPMIKERMVRAGTMLMTYQPLRGTPNFFRLVLQNSGLSEIDMQFFVEEIERLAADL

SEQ ID NO: 186 - protein, 548 aa, Acromyrmex echinatior
MPANEDTSNDETSLRMKHERAGPSMESSWRKMSEEHPRANPSPIPNLPGLVNGIEERQGIEKWDFRSMPRRDAHEKLFRDFFELVLQRAVFQPTSGKDRVVEWVDPYDLRSVVDLSLPAEGVSHEKLLTLTRDIIKYSVKTSHPHFVNQLFSSLDPYGLLGQWLTDALNPSVYTYEVSPVFSLMEEDVLREMRAIISWQEGEGLFCPGGSMANGYAINLARHHRYPNLKQSGLSQMPRLVVFTSEDAHYSVKKLAAFLGIGYDNVYLVKVDSRGKMMVSDLEAQIARAVEEGAAPLMVSATAGTTVIGAFDPLREIAEVCRKHELWFHVDAAWGGGALISETYRGLLDGIQFADSVTWNPHKLLAAPQQCSTLLLRHEGLLQAAHGCGASYLFQNDKFYDASFDCGDRHVQCGRRADVVKFWYMWKAKGTRGLEAHVDRLFALSRHFTDLIRTRDGWHLLVEPECINVCFRYIPPSKRHLTGQELEQALHKIAPIIKERMVRAGTMLITYQTLRNMPNFFRLVLQNSGLTEADMKFFVEEIERLAMDL

SEQ ID NO: 187 - protein, 544 aa, Camponotus floridanus
MPANEDTSANDFAFKRIKPERANPAESQPKMSRKDDSSTNLILSNFTASVEERKEAEKGDFRSIPCRSVHEKLFRDFFELMLQRAVFQSTSGEERVVEWIDPNNLRSVVDLSLPTEGVSHEELLTLTRDIIKYSVKTGHPHFVNQLFSSLDPYGLLGQWLTDALNPSVYTYEVSPVFSLMEEDVLREMRAIIGWQGGEGLFCPGGSMANGYAINLARHHRYPNLKQSGLSQMPRLVVFTSEDAHYSVKKLAAFLGIGYDNVYLIKVDSRGKMVVTDLEAQIVRAINEGAVPLMVSATAGTTVMGTFDPLKKIAEVCRKHGLWFHVDAAWGGGALVSRTYRGLLDGIQLADSITWNPHKLLAAPQQCSTLLLRHEGLLQEAHGCGASYLFQNDKFYDATFDYGDRHVQCGRRADVVKFWYMWKAKGTRGLEAHVDCVFALSRYFADLIRTRDGWRLLAEPECTNVCFRYIPLSKRHLTGRELDQALHKIAPMIKERMMRAGTMLITYQTLRDMPNFFRLVLQNSGLTEADMKFFVEEIERLAVDL

SEQ ID NO: 188 - protein, 532 aa, Pediculus humanus
MFPVISTQKQSFGIINLSLLEDNNFLIKTNSVVDKSDKEDEKLNQKHWSLPLEKYHYDFIVKCVGIIMKEAVFDGTNRNSKVVQWQDPEKLKKSFDFSLNKYSETEGKLLHLISTIIKFSVKTGHPYFVNQLFSGVDPYGLIGQWLTDALNPSVYTYEVSPVFSIMEEVVLEEMRKFIGFPNGKGDGTFCPGGSISNGFGISCARYHLFPQVKKLGIYGIGLRLVLFTSRDAHYSIVKLATFMGLGSDNVISIKTDESGKMKPEELEKAILKVLQEGGTPFMVSATSGTTVLGAFDPLDSIADICEKYKLWFHVDAAWGGGCLMSSIHKKKLQGIHRTDSVTWNPHKLLGVPQQCSAFLTKHKNLLKNVHCAKATYLFQKDKFYDVKYDTGDKHIQCGRRADVLKFWFMWKAKGSSGFEKHINKIFETALYFKKSIENKPDFQLVLSEPECTNICFWYIPPRLQNSKYNNDDLNKVAPRMKEKMMKDGSMMITYQPLRHLPNFFRLVIVNSGLDTHDMDRLITIIQNAGASI

SEQ ID NO: 189 - protein, 549 aa, Atta cephalotes
MPANEDTSNDETSLRMKHERADSSAESSWRKMSEERPRANSSSLTLNLPGLVNGTEERQRAEKRDFRSMPRRDAHEKLFRDFFELVLQRAVFQSTSGKDRVVEWVDPYDLRSVVDLSLPAEGVSHEELLTLTRDIIKYSVKTGHPHFVNQLFSSLDPYGLLGQWLTDALNPSVYTYEVSPVFSLMEEDVLREMRAIIGWQGGEGLFCPGGSMANGYAINLARHHRYPNLKQSGLSQMPRLVVFTSEDAHYSVKKLAAFLGIGYDNVYLVKVDSRGKMMVSDLETQIAQAVKEGAAPLMVSATAGTTVIGAFDPLREIAEVCKKHGLWFHVDAAWGGGALVSGTYRDLLDGIQFADSVTWNPHKLLAAPQQCSTLLLRHEGLLQAAHGCGASYLFQNDKFYDASFDCGDRHVQCGRRADVIKFWYMWKAKGMRGFEAHVDHLFALSRHFTDLIRIRDGWHLLVEPECINVCFRYIPPSKRHLAGQELEQALHKIAPIIKERMVRAGTMLITYQTLRNMPNFFRLVLQNSGLTEVDMKFFVEEIERLAMDL

SEQ ID NO: 190 - protein, 497 aa, Daphnia pulex
MENPALIGWFQTEPSQEQHEQFMRKVMDIVLKEAVFEGTSRNNLVIEWMEPESLLTLLGKELPKNPQSDETLVELIKNVVRYSVKTGHPHFINQLFSSLDPYGLVAQWVTDSLNPSVYTYEVAPVFTLLEHQILREMRRWVGFPDGSGDGVFCPGGSMANIYGIQCARHRAMPSLKETGTFGSPRLVVLTSKDAHYSVKKACFLLGIGVSNLYLVDVDTSGRMDLVHLRQEVQRALNENARPFMVSATAGTTVLGATDPLDGIADICQEFGMWMHVDAAWGGGALMSTKHRHILKGIERADSVTWNPHKLLGVPQQCSTFLTRHADLLLEANSASASYLFQKDKFYDPKWDVGDKYLQCGRRADVLKFWLMWQAKGSLGLEKHVDTLFENVAYFTSFIRNRKGFQLVLEEPPFVNVCFWYIPPSLQGAQHDEDYEEKLHKIAPKIKERMIKKGSMMITYQPLRNLPNFFRLVLQSSAVTIDDMEFFAEEIERLGCDL

SEQ ID NO: 191 - protein, 581 aa, Lottia gigantea
METKRFDNMSINDEATKEQFNELKQRLLEGKSLKSKQVSKVMIDVDSESEDSALSLQDSSANTDESDPDESNVETCTTQLQHSQRVNSRRKSTKAKFLTIPQVHHDDFLSDTFDLIMKEIVQKAGDRSQKVVEWKAPEELRELMDLDPTAVGETHEKLLMRLQDIIKYSVKTGHPRFVNQLFSSLDPYGLAGQIVTDALNTSQYTYETAPVFTLMEETVLKTMRTCIGYTEGNGIFCPGGSLSNIMAVNCARHFMFPQTKKTGMFGLPPLVIYTSELAHYSIKKAGYLLGFGDDNVKLVKTDELGKIIPEDLERQIQETIDEGCTPFMIVATAGTTVFGAFDPIDKMADVAQKYGLWYHVDGAWGGGVLMSKKHRDMMKGVDRADSVTWNPHKLLGVPQQCSCFLTKHVNILQQCHRADAKYLFQKDKFYDTSYDTGDKTFQCGRKVDVLKFWLMWKAKGSEGFEQHIDKLFDNTRYIVEKLKQREGFRMVVNEPDCTNVCFWYVPPSLRNMPEDEEFWNRLHTVAPKVKEGMIRDGTMMITYQPQKDLVNFFRLVLQNSATTYEDMDFFIDEIERLGKFL

SEQ ID NO: 192 - protein, 538 aa, Branchiostoma floridae
MSNILTSLEDSSFSCSCAKEMINGGIDGHLNDCSVRNLKSSLNDDTANVKAPKKDPLPKDEEDFLKAVFQVILEDGVRKGRDITQKVVDFHQPDELRTLLDLEIRDTPEDHQALIKHMKDTVKYSVRTSHPRFFNQLFSGQNTYALAGQWLTETLNTSQYTFEVAPVFTIMENVVLHKMRDIVGYSGGDGIFCPGGSISNLYALNVARYRYMPDIKKTGLFGLPRLVVFTSKQSHYSIKKAASVLGIGTNNVVLVDCDERGKMIASDLEAQILRVKAEGAVPFFVNCTSGTTVLGAYDPLDEVSDICEKHGLWMHVDAAWGGGVMMSPKYRASRMRGVERSDSITWNPHKMMGAGQQCSAFLLKHENLLQHCHEAKAKYLFQQDKFYDVSYDTGDKSIQCGRKVDVFKLWLMWKAKGSQGFHQDMDAIFDKTRYLVEKVKAREGFKMVLDEPECSNVCFWYIPPSLRGKEDEADYKDKLHQVAPRIKERMVLSGTMLVGYQPLGNKPNFFRQVFSSPSVTEEDLDFLLDEIERLGEDL

SEQ ID NO: 193 - protein, 335 aa, Meligethes aeneus
KEMRQIVGFKNGDGDGIFCPGGSMANGYAISCARYKFMPEIKQKGLHALPRLVLFTSRDAHYSIKKLSSFLGIGTDNVYAINTDEKGKMDMKHLEEEVERSIKEGGAPFMVSATSGTTVIGAFDPLEKIHEICQKYGMWMHVDAAWGGGALMSKKHRYLLKGIEKADSVTWNPHKLLTAPQQCSTLLLKQDGILSAMNSANATYLFQKDKFYDTKYDIGDKHIQCGRRPDVIKFWFMWKAKGTSGFEQHIDKVFENAKFFTDTIREREGFEMVIPEPECTNICFWYVPPSLRNRKSDPDYQDKLHKVAPKIKEKMMREGTMMVTYQPLRETPNFF

SEQ ID NO: 194 - protein, 401 aa, Solenopsis invicta
STSGEDRVVEWVDPYELRSVVDLSLPAEGVSHEELLKLTRDVIKYSVKTGHPHFVNQLFSSLDPYGLLGQWLTDALNPSVYTYEVSPVFSLMEEDVLREMRSIIGWHNGEGLFCPGGSMANGYAINLARHHRYPHLKQTGLSQMPRLVVFTSEDAHYSVKKLAAFLGIGYDNVYLAKVDSRGKMVVSDLEAQIARAIEEGAAPLMVSATAGTTVIGAFDPLKDIAEVCKKYGLWFHVDAAWGGGALVSAAYRGLLDGLHLADSVTWNPHKLLAAPQQCSTLLLRHKGLLQAAHGCGASYLFQNDKFYDASFDCGDRHVQCGRRADVVKFWYMWKAKGTRGLEAHVDRVFALSRYFADLIRAREGWHLLVEPECTNVCFRYVPPSKRHLAGQELDQVLHKVS

SEQ ID NO: 195 - protein, 555 aa, Crassostrea gigas
MASCMTESFKVHSCAHKRIHDKNDFEVEPTEKQRITMLSDKPVRKSNKENSMCNVTIKTKESHSENHKKHEKKAPKQEKAKHEFLDKLYEMMIKDGFMKARDRNEKVVEFSYPEELKQKIDFDLGSKTSDEKILSLCQDIIKYSVKVAHPRFFNQLYGGLDEYSLGGCWLTETMNASLYTYEVSPVFSLMERVVIDKMLGKIGFEDGDAMFCPGGSISNMYALNIARYFKYPEVKKKGIKGIPDICAFTSEKCHYSIGKGVAFMGMGLDNLINVKTDANGKMIPEDLEKKILEAKAEGKTPYFVNATAGTTVFGAFDPIDEIADICQKYNLWMHVDGAWGGGALLSKTYSPLLKGVERADSMTWNPHKLMGVPQQCSLVFTKHKGLLEQCHSANASYLFQQDKFYDVSYDTGDKSIQCGRKNDVLKLWIMWKNKGDEGFERDIDNQFECAKYLAQLVQEREGFELMLEPQCTNVCFYYIPKRLRGLERTPEWWNEISKVGPKVKEGMMKAGSMMVGYQPDGDFVNFFRMIISNLDTVKSDMDFVVDEIDRLGKDL

SEQ ID NO: 196 - DNA, 1020 bp, Candida parapsilosis
atggttaactacggcttcgttggtttgggtcagatgggtcaacacatggctagacacatctacaaccaattggaagtcgacgacaagttgtacgtttacgacaccgttccaactgccgttgaccaattcgtttcaaacgttacccagcaaaacgctaccaacaaggagaagttggttaccttgccagacttgaagtccttcgttaccggtgttgacggtcaattggacttcatcgtcaccatggttccagagggtaagcacgtcaagggtgttgttgaggacatcgttacctctttcgaacaaaacggttactccccagactacaacactaccatcatcgactcctccaccatcgacatcccaacctccagacaggttcacgaatacgttaaggaaaccttgcctcaattcgacttcatcgacgcacctgtttccggtggtgttgctggtgccagaaagggcaccttgtccttcatgttgtccagagaaacccaccaagacgtctctccagccttgactaccttgttgaacaagatgggtaagaacatcttcccatgtggtgctacccacggcaccggtttggctgctaagttgtccaacaactacttgttggctgtcaccaacatcgcagttgcagactccttccaattggcaaaggcattcggtttgaacttgcaaaactacgctaagttggttgcagtttccaccggcaagtcttgggcttctgttgacaactgcccaatccctggtgtttacccagaaaacaacttgcctgcagacgttggttaccaaggtggtttcatcaccaagttgaccagaaaggacgttgttttggctaccgactgcgccaaggaccaaggtagattcttgttcttgggtgacgcaggtagatactggtacgacaaggcgtgtgaaagagaagacatcgccaacagagacttggcagttttgtacgaatggttgggtgacttgaagcaagaagcagacggcaccgttgtcgacaccaaggtttccaagtaa

SEQ ID NO: 197 - protein, 339 aa, Candida parapsilosis
MVNYGFVGLGQMGQHMARHIYNQLEVDDKLYVYDTVPTAVDQFVSNVTQQNATNKEKLVTLPDLKSFVTGVDGQLDFIVTMVPEGKHVKGVVEDIVTSFEQNGYSPDYNTTIIDSSTIDIPTSRQVHEYVKETLPQFDFIDAPVSGGVAGARKGTLSFMLSRETHQDVSPALTTLLNKMGKNIFPCGATHGTGLAAKLSNNYLLAVTNIAVADSFQLAKAFGLNLQNYAKLVAVSTGKSWASVDNCPIPGVYPENNLPADVGYQGGFITKLTRKDVVLATDCAKDQGRFLFLGDAGRYWYDKACEREDIANRDLAVLYEWLGDLKQEADGTVVDTKVSK

SEQ ID NO: 198 - DNA, 996 bp, Debaryomyces hansenii
atgaccaactacggcttcatcggtttgggtgaaatgggtcaacacatgggtagacacatctacaacaagttggagccagacgacaagttgtacgtttacgacttggaaccagcaaacaccaagaagttcgtcgacaccgttaccgaagcatcccctgcaaacaagaagttggtcgttccattggaatccatctccgacttcgttcacaaggtcgactcccaattggagttcatcatgaccatggttccagaaggtaagcacgtcaagtccgttgtcgaagagttggtccagaactacaagaagtgtgctaccgacatctccggtgtctccactaccttcttggactcctccaccgtcgacatcccaacctccatcgaagtccacaagtacgtcaagcaacaaatcccagacttcgacttcatcgacaccccagtttccggtggtgttgccggtgccagaaagggcaccttgtccttcatgttgtccagagagacccacgaagacatgtccccatccttgacctccttgttgtccaagatgggcaccaacatcttcccatgtggtaagaaccacggcaccggtttggcagcaaagttgtccaacaactacttgttggctgtcaccaacttggcggtcgcagactccttccaattggcaaagtccttcggtttggacatgaagaactacgctaagttggtctccgtttccaccggtaagtcctgggcttccgttgacaactgtccaatcaaaggcgcttacccaaaggaaaacgacttgccagcagacagagactgccacggtggtttcatcaccaagttggctagaaaggacttggtcttggctacccaatccgcaaagtccaacaacagattcttgttcttgggtgaagtcggtaagaagtggtacgacaaggcttgtgaaagagaagacttggcaaccaaggacttgtccgtcttgtacgaatggttggaagaattgtccgaaaaggacaagtaa

SEQ ID NO: 199 - protein, 331 aa, Debaryomyces hansenii
MTNYGFIGLGEMGQHMGRHIYNKLEPDDKLYVYDLEPANTKKFVDTVTEASPANKKLVVPLESISDFVHKVDSQLEFIMTMVPEGKHVKSVVEELVQNYKKCATDISGVSTTFLDSSTVDIPTSIEVHKYVKQQIPDFDFIDTPVSGGVAGARKGTLSFMLSRETHEDMSPSLTSLLSKMGTNIFPCGKNHGTGLAAKLSNNYLLAVTNLAVADSFQLAKSFGLDMKNYAKLVSVSTGKSWASVDNCPIKGAYPKENDLPADRDCHGGFITKLARKDLVLATQSAKSNNRFLFLGEVGKKWYDKACEREDLATKDLSVLYEWLEELSEKDK

SEQ ID NO: 200 - DNA, 1017 bp, Meyerozyma guilliermondii
atggcaaactacggtttcatcggtttgggtcaaatgggccaacacatggcgagacacatctacaaccaattggaaccaaacgactccttgtacgtccacgacgtctccagagacgcaaccgagaccttcgttaacaccgtcacctccgcttccccagacagaaaggactgtttgaaggcattgtacaacatctccgacttcgttaccggtgttaacgctcaattggactacatcatcaccatggttcctgaaggtagacacgttaagggtgttgttcaacagttgatcgaaacctaccaacaaggtgcaccatccactaccaagactaccatcttggactcatctaccatcgacatcccaacctcaatcgaagttcacaactacgtcaagcagcaaatcccagaattcgacttcatcgacaccccagtcagtggtggcgttgctggtgccagaaagggcaccttgtccttcatgttgtccagaccaaccgacgaatccatctctccttctttgaacaccttgttgaagaagatgggtaagaacatcttcccatgtggtgcaaaccacggtgcaggtttagccgctaagttgtccaacaactacttgttggcagttaccaacttggcggttgccgactccttcagattggctcactccttcggtttggacttggtcaagtactccaagttggttgctgtttccaccggcaagtgttgggctgcagttgacaactgcccaatcccaggtgtctacccagccgagtacagattgccagtcgacgacggttacaacggtggtttcatcaccaagttgaccaagaaggacttggttttggctaccgacgctgctaagttcaacgaccgtttcttgttcatgggtgacgtttccagacactggtacgaaaaggcttgtgaaagagaagacatcgcttccagagacttggcagttttgtacgaatggttgggtgacatggaacaacaagcagacggcaccatcgtcgacaagaaggacgtctaa

SEQ ID NO: 201 - protein, 338 aa, Meyerozyma guilliermondii
MANYGFIGLGQMGQHMARHIYNQLEPNDSLYVHDVSRDATETFVNTVTSASPDRKDCLKALYNISDFVTGVNAQLDYIITMVPEGRHVKGVVQQLIETYQQGAPSTTKTTILDSSTIDIPTSIEVHNYVKQQIPEFDFIDTPVSGGVAGARKGTLSFMLSRPTDESISPSLNTLLKKMGKNIFPCGANHGAGLAAKLSNNYLLAVTNLAVADSFRLAHSFGLDLVKYSKLVAVSTGKCWAAVDNCPIPGVYPAEYRLPVDDGYNGGFITKLTKKDLVLATDAAKFNDRFLFMGDVSRHWYEKACEREDIASRDLAVLYEWLGDMEQQADGTIVDKKDV

SEQ ID NO: 202 - DNA, 1023 bp, Clavispora lusitaniae
atgaagaacttcggcttcatcggtttgggtcaaatgggtcagcacatggctagacacatctacaaccaattggaacctcaagacaccttgtacgtttacgacgcagtcccatccgcaaccgacgcgttcgtcgaaaagaactccaccccagaaaaggcttctcaattggtcccattgaagtccttgtcctccttcgttaccgacgttgactcccaattggacttcatcatcaccatggtcccagaaggtaagcacgtcaaggctgtcatccaagacttggtttcctcctaccaaaagcaaccatccttgcaaccaatgaccttcttggactcctccaccatcgacatctccacctccagagaagttcacgaattcgttaagtccaccatcccatccttcgacttcatcgacaccccagtctctggtggcgttgctggcgctagaaaggcctccttgtccttcatgttgtcccgtgaaaccatcgaagacgtctcccctgctttgacctccttgttgaacaagatgggtaagaacatcttcgcatgcggtccttcccacggttccggcttggcagcaaagttggcaaacaactacttgttggctgtcaccaacttggctgttgcagactccttccaattggcaaacaccttcaacttgaacttgcaacaatacgctaagttggttgctgtttccaccggtaagtcctgggcatccgttgacaactgtccaatcgctggtgcttacccaaaggagtacaacttgccagcagactccggttacgaaggtggtttcatcaccaagttgaccaagaaggacttggttttggcgaccgactgtgctgcggaatacaacagattcttgttcttgggcgacatctccagaaagtggtacttgaaggcatgtgagagagaagacttgggttccagagacttgggcgttttgttcgaatggttgggtcaaatcgaagaaagaaacggtgaagttgttgacaccaagacctccgaaccattgaagatcaactaa

SEQ ID NO: 203 - protein, 340 aa, Clavispora lusitaniae
MKNFGFIGLGQMGQHMARHIYNQLEPQDTLYVYDAVPSATDAFVEKNSTPEKASQLVPLKSLSSFVTDVDSQLDFIITMVPEGKHVKAVIQDLVSSYQKQPSLQPMTFLDSSTIDISTSREVHEFVKSTIPSFDFIDTPVSGGVAGARKASLSFMLSRETIEDVSPALTSLLNKMGKNIFACGPSHGSGLAAKLANNYLLAVTNLAVADSFQLANTFNLNLQQYAKLVAVSTGKSWASVDNCPIAGAYPKEYNLPADSGYEGGFITKLTKKDLVLATDCAAEYNRFLFLGDISRKWYLKACEREDLGSRDLGVLFEWLGQIEERNGEVVDTKTSEPLKIN

SEQ ID NO: 204 - DNA, 1035 bp, Issatchenkia orientalis
atgagtaagccaaaagtcttgttgattggattcggtggtgttggaaccattgtatcttacactttggagcaccttggccgtgccgaggtctctgcagtttcacgcccagagacccatgactctatagtaaatggatttcgtatcgagtccattgactatggtatcgttgagaactatgttccgaccaacgtttatgtcacagcaaaagaagcttacaaacaacaaggcccatttgattatatcattatcaccacaaagaatatccctgatattgcaccagttgttgatatgattgatgggtgctacaacgagaaatccgttattgtgttgattcaaaatggcattgggattgaaattccaatttataggagatatccaaacgcaattatattaagtggggtcacgttgattggcacaacgttgtacgaagctacagtcaagcatgtcgcaagggatgatatcaagtttgggccttttatcaactataacttggataaacagctgcagattaacaagtgtaaggaatttattgaactttatgaaaacgacaaaaacttggttgaatatgaggaagatgtcaagtttaccagatggaggaaactcgtctacaatgcctgtatcaatacaacctgtgcgctagctaatctagatgcaggtagagtgcagatatttggcggattcgagaccctcgtcaaacctgccatgttggaagtcattgcggttgctaaaagtgagggtgttgaattaccagcaaaggaagtgatggataccatgtgcaatatgggcaaagatgtctactatccaccttccatgttgattgatgttcggaacggcacgtacctggaacatattgtcatcattggcaatgttgtcaaatatgggtcccgtaatggtgttccaattccaacattgacggtgttgaacaacttgttgaagctcgtccaaatgagaacaatggaagccaataagaggtttgtcttgccagagaagaggccacttccagaggaaaactaccagattgaatacctctattga

SEQ ID NO: 205 - protein, 344 aa, Issatchenkia orientalis
MSKPKVLLIGFGGVGTIVSYTLEHLGRAEVSAVSRPETHDSIVNGFRIESIDYGIVENYVPTNVYVTAKEAYKQQGPFDYIIITTKNIPDIAPVVDMIDGCYNEKSVIVLIQNGIGIEIPIYRRYPNAIILSGVTLIGTTLYEATVKHVARDDIKFGPFINYNLDKQLQINKCKEFIELYENDKNLVEYEEDVKFTRWRKLVYNACINTTCALANLDAGRVQIFGGFETLVKPAMLEVIAVAKSEGVELPAKEVMDTMCNMGKDVYYPPSMLIDVRNGTYLEHIVIIGNVVKYGSRNGVPIPTLTVLNNLLKLVQMRTMEANKRFVLPEKRPLPEENYQIEYLY

SEQ ID NO: 206 - protein, 467 aa, Pichia membranifaciens
MSISESYFPTEPKGPEVKTAIPGPKSNAKLAELASVYDTKAAYFVTDYYNSLGNYICDADGNKLLDSYCQISSIALGYNNPALLKMAHSAEMAVALCNRPALACFPSTDYYDILKEGLLSVAPKGLDKVCTAHTGSDANEMAFKAALMYQANKKRGGKPFTQEELISVMENQLPGTSDMVILSFEKAFHGRLFGSLSTTRSKAIHKLDIPAFDWPKAPFPTLKYPLEKYEAENKAEEERCLQELDAIITNYPSKIAAAIVEPVQSEGGDNHASPAFFQGIRAITKKHDVLMIIDEVQTGGGGSGKMWLHEHYDVTPDIMTFSKKMQNAGFFFSEEGLAGDQPFRQFNTWCGDPSKALIAKAIIGQIKEKDLLKNAAETGDYLYSKLALIGEKNSKLLNLRGKGRGFFIAFDLPTAAERNQLLGECKKLGLNIGGCGDQGVRLRPALVFGKKHADILADIVGKAFEKL

SEQ ID NO: 207 - protein, 469 aa, Candida arabinofermentans
MSTIAEKYYPSEPEKPVIKTAIPGPVSQEMLKQLSGVYDTKASYYVADYYNSIGNYICDADGNMLLDAYCQIASIALGYNNPEILKTTKSDQMSVALANRPALACFPSTDYYKILEEGLLAVAPKGFTRVLTAHTGSDANEMAFKAAFIWQATKKRGDASFTAEELSSVMDNKLPGTSDMVILSFDKGFHGRLFGSLSTTRSKAIHKLDIPAFNWPKAPYPALKYPLEEHEAENRAEEQRCLDAFETIVSQWPGKIAATIIEPVQSEGGDNHASPFFFQGLRDLTTKHGILYIIDEVQTGGGASGKMWLHEHYGISPDIVTFSKKMQNAGFYFKDKEIEGAMPFRQFNTWCGDPSKALIARTICQEIMNNDLLDNTSKVGAYLYSKLEDIQKSYPKLVSNLRGKDRGHFISWTMPNASIRDKFLFICRQNGLNIGACGDESVRLRPTLTFGVKHTDILIDIVSKALSQL

SEQ ID NO: 208 - protein, 469 aa, Brettanomyces bruxellensis
MGVSDLYFPDEPKGPSMKTKCPGPETEAKLAELSTVFDTKNAIFVADFYNSLGNYICDADGNILLDAYCQISSIALGYNNPELLKTTKTKEMSVALANRPALACFPSTDYYKILKEGLLSVAPEGLDKVYTAHTGSDANEMAFKAALLYQATKKRGGKPFTEEEKASVMKNEFPGASDMAILSFTKGFHGRLFGSLSTTHSKPIHKLDMPAFKWPVAPFPVLKYPLEDHVEENKEEEANCLKELDHILATYPHQIAAAIIEPVQSEGGDNHASPTFFKGVRELTKKHGVLMIVDEVQCGGGGSGKIWLHQHYGITPDIMTFSKKMQNAGFFFHDPAIAGDTPSRQFNTWFGDPSKALIARTIVHEIKKNHLLDEVTKTGDYLYSKLDAIRKKHLKLMLNLRGQHRGFFVGFDLPTVELRDKFIYTCRQKGLNLGGCGDKAVRLRPALVFQPKHVDILAKIMEESFDTLE

SEQ ID NO: 209 - protein, 492 aa, Candida guilliermondii
MLRSVHRTTSAARIAQLAKRYSSYASSVFPDEPSVPQLKTEVPGPIGTQLNTNLGDVFDNRAAYFVTDYYNSIGNYISDADGNKLLDVYMQIASIGLGYNNPALKQVAKSDEMTTALINRPALACFPGVDYQKVLEDGILKAAPPGMTKVWTATTGSDANETAFKAAFMLQAARDRGSRDFNQQELISVMNNEAPGASEKCILSFDKAFHGRLFGSLSTTRSKAIHKLDIPAFPWPKAPFPALKYPLKDFENENKQEENRCLEQLEDIIVGKGKGNIAALIVEPVQSEGGDNHASASFFQGVRDITLKHNIFMIVDEVQTGVAATGKFWAHEHWNLSTPPDMVTFSKKFQAAGFYFRDPELQPRQAYRQFNTWCGDPSKALIARTIVQEIEANNLVAATASVGDYLFNNLSSLFEKYPGHASNIRGQNMGTFIAWDSPNADHRAKFLLACRAKGVNIGGCGEAAIRLRPSLAFNESHADVLCGIIENVLGEM

SEQ ID NO: 210 - protein, 470 aa, Candida guilliermondii
MSICEKYFPREPSAPVVSSSSTGEASKAEIKTLDKTFDSRAAYFVADYQKSEGNYIADVDGNLYLDVYAQIASIPLGYNNPELIKTAKSDKMIRAIVDRPAMGNFPGADLKEITSKLLEFAPKGQDKLWSGLSGADAVELAFKAVFFWYQSKKRGYAKPFTAEENESVMKNQAPGSPELAILSFERSFHGRLFASGSTTCSKPIHKMDLPSFKWPKAQYPSYKYPLEEHKEENKREDERCLKIVEDIFSTWKCPIAGLLIEPIQSEGGDNHGSAEFFQGLRDITIKHGALLIMDEVQTGVGATGTFWCHEHFNLSPPPDLVTFSKKFQSAGYFFHDPELVPDFAYRQFNTWCGDPARMILAGAIGDEIVKHDLAAKAQEVGDYLFKKLESLQSKYPKYLQNLRGKNRATFIAWDLPSGDARNKFLSDMRAAGVNIGGCAEASVRLRPTLVFEQKHADILVAAIEKVLGSY

SEQ ID NO: 211 - protein, 470 aa, Issatchenkia orientalis
MSYASRYFPNEPTAPKVVTESIPGPKGKSAIASLGEVFDNRCAYFVADYEKSVGNYIVDVDGNVLLDAYAQIASIPLGYNNPKLIEVAKSDKMTRAIVNRPALGNFPGADFEQMQRDLLKHAPKGQTHVWNGLSGADANEAFKAVFFNYQSKKRGFDKPFTKEEEVSCMENMAPGNPEIAILSFKKAFHGRLFASGSVTRSKPVHKMDMPSFAWPTAEFPAYKYPLEENEEANMAEDARCLAIVEDRLQNWKCPIAGVIVEPVQSEGGDNHASAAFFQGLRDLTLKYGAKLIIDEVQAGCGATGIMWDHERYNITPPPDLVTFSKKMQSAGYWFHDPELIPNQPYRQFNTWCGDPKGVILAAAICDEVVDNNLLEPLRETGDYFYSKLESIQKQYPKLISNLRGKGKACFLAFDMPSGSLRADFLGKMKLAGVNVGGCADVGVRLRPGLTFEKKHVDIFIAAMEKVLPTL

SEQ ID NO: 212 - protein, 471 aa, Saccharomyces kluyveri
MTVCESYYPSEPTKPSVATSSIPGPKSQKELAELGKVFDARPAYFVADYEKSVGNYIVDADENVYLDLYAQISSIALGYNNPSLIKAAQSPEMIRALVDRPALGNFPSKDLTGILSKLLKFAPKGQDKIWSGLSGADANELAFKAAFMYYRSKQRGYSTEFSAEENESVMENSLPGSPHLAVMSFKRAFHGRLFASGSVTCSKPIHKLDFPAFNWPHAEYPSYQFPLEANEEANRAEDDRCLKIVEDLITSWPIPVAALIIEPIQSEGGDNHASKYFLQKLRDVTLKHGVVYIIDEVQTGVGATGKFWCHEWAEITPAVDLVTFSKKFQSAGYFFHDPEFIPNKAYRQFNTWCGDPARMIIAGAIGQEVVDKSLVEQCARVGDYLFGKLEALQSQYPKYFQNLRGKKRGTFIAWDLPTTDLRDSLLKNLKLNGCNVGGCAEKSVRLRPALTFEEKHADIFVDTLKKVVPQL

SEQ ID NO: 213 - protein, 474 aa, Schizosaccharomyces pombe
MSSTATVTESTHFFPNEPQGPSIKTETIPGPKGKAAAEEMSKYHDISAVKFPVDYEKSIGNYLVDLDGNVLLDVYSQIATIPIGYNNPTLLKAAKSDEVATILMNRPALGNYPPKEWARVAYEGAIKYAPKGQKYVYFQMSGSDANEIAYKLAMLHHFNNKPRPTGDYTAEENESCLNNAAPGSPEVAVLSFRHSFHGRLFGSLSTTRSKPVHKLGMPAFPWPQADFPALKYPLEEHVEENAKEEQRCIDQVEQILTNHHCPVVACIIEPIQSEGGDNHASPDFFHKLQATLKKHDVKFIVDEVQTGVGSTGTLWAHEQWNLPYPPDMVTFSKKFQAAGIFYHDLALRPHAYQHFNTWMGDPFRAVQSRYILQEIQDKDLLNNVKSVGDFLYAGLEELARKHPGKINNLRGKGKGTFIAWDCESPAARDKFCADMRINGVNIGGCGVAAIRLRPMLVFQKHHAQILLKKIDELI

SEQ ID NO: 214 - protein, 472 aa, Kluyveromyces lactis
MSVAAKYYPNEPTEPKVVTSEIPGPESKAKVASLGEVFDSRPAYFVADYAKSSGNYIVDVDGNKFLDVYAQISSIALGYNNPALIEAAKSDKMIRALVDRPALGNFPGADLEDILKQLLKFAPKGQNKIWSGLSGADANELAFKAAFMYYRQLQRGGHGIDFSEEENSSVMENTSPGSPQLAVLSFKKAFHGRLFASGSSTCSKPIHKLDFPAFNWPHGEYPVYKYPLSENEEENKKEDDRCLAIVEDLIKSWPTPVAALIIEPIQSEGGDNHASKYFLQSLRDLTSKYNVVYIIDEVQTGVGATGKFWCHEWADIQPPVDLVTFSKKFQSAGYWFHDDRFIPNKAYRQFNTWCGDPARMIIAGAIGQEIVDNNLVDQCARVGDYLFEKLEKLQAKYPTRLINLRGKNRGTFIAFDLETSAERDQLLKLLKSNGCNVGGCAEKSVRLRPSLTFEEKHADIFVDALEKSIGQL

SEQ ID NO: 215 - protein, 498 aa, Yarrowia lipolytica
MLRLKTLSSAVRVRSGAGFAQTGLRGYASLCETYFPNEPKAPVVKTSFPGPATQDALLSLDSVFDTRAANFVADYEKSVGNYIQDVDGNIYLDVYAQISSIALGYNNPKLVEASKSPEMISSLVNRPALGNFPSSTYEKILKDGIIAAAPPGFKDVWTGMTGSDANETAFKAAFLWRRTIERDGQPFTEADEQSVMNNQGPGSASLSIMSFDHAFHGRLFGSLSATRSKPIHKLDIPAFDWPKAPFPMLKYPLDKHAKENKAEEERCLKAVDEILAKNPIPVAAIIVEPIQSEGGDNHASPEFFQGLRKITKKHNVLMIVDEVQTGVAATGKFWAHEHWNLPFPPDMVTFSKKFQAAGYYFSDPSIKPNLPYRQFNTWCGDPSKAIIAKTIWQECDKHHLSNRVAEVGSYLYGKLQKLAEKYPKEINNLRGKDCGTYIAWDASSGKAKDALVSGMKAFGVNIGACGVQTVRLRPMLVFEEKHADILVGALDSYLSQAK

SEQ ID NO: 216 - protein, 472 aa, Naumovozyma castelli
MPACESYYPAEPKQPVIKTKTIPGPECNKELEKLDKVFDSRPAYFVADYEKSLGNYIVDVDGNTYLDLYAQIASIALGYNNPELIKAAQSPTMIRALVDRPALGNFPSKEITPLLNDLLKFAPKGQDHVWSGLSGADANELAFKAAFIYYRFKQRNGKDFTAEELESVMDNSPPGSPELSVLSFKRAFHGRLFASGSVTCSKPIHKLDVPAFRWPHAEFPSYKYPLDDEANSKVNKEEDDRCLKIAEDLIKTWPIKVAALIIEPIQSEGGDNHASKYFLQSLRTLTLKYNIVYIIDEVQTGVGATGKFWCHEYADIQPPVDLVTFSKKFQTAGYFFHDPAFIPSKPYRQFNTWCGDSARILIANTIGGEIVKNDLLEQCSRVGNYLFKKLENLQAKNPTLFQNLRGKGRGTFIAWDLPTGEIRDLLLKKLRLNGCNVGGCAVTAVRLRPTLTFEEKHADIFIEALTKSIAEL

SEQ ID NO: 217 - protein, 483 aa, Ashbya gossypii
MAIFSKETHFEMTSVSNSYYPDEPTAPKVVTDTIPGPKSQEAIRDLEGVFDSRAAYFVADYDKSIGNYIADVDGNMYLDMYAQIASIALGYNNPELIKAATSSEMVRALVNRPALGNFPGCDLREILARLLRLAPAGQDKVWSGLSGSDANELAFKAAFIYYRSKKRGYDKEFSAEELSSVMGNSAPGSPQLAVLSFKSAFHGRLFASGSATCSKPIHKLDFPSFPWPHADYPSYEYPLNDHTEVNRKEDDRCLAIVEEIIKSWHVPIAALIIEPIQSEGGDHHASSYFLQRLRDITLEHGVVYIIDEVQTGVGATGKFWCHEWANIQPPCDMVTFSKKFQSAGYFFHDPLFVPNKPYRQFNTWCGDPAHMIIAGAIGQEVIDKKLPDQCARVGDYLYTKLDALRAQYPHLMQRLRGRHRGTFIAWDLPDTETRDHMLKKLKLAGCNVGGCAERSVRLRPTLAFEEKHADVFVAALEHVLTEL

SEQ ID NO: 218 - protein, 486 aa, Candida parapsilosis
MLRRARPISKFVVRFNSTAARYFPSEPQAPIVSTESIPGPKSIAINNELGTVFDNGATYFVADYFKSLGNYISDADGNKLLDVYCQISSIALGYNNPKLIEAAKSDEMTSAIVNRPALACFPSTNYKDILQQGLLAAAPSGMNKIWTSLSGSDANETAYKAAFMYQHAKLRQTDGFTEEELTSVMNNETPGASDMVILSFDKGFHGRLFGSLSTTRSKAIHKLDIPAFPWPKAPFPQLKYPLEEFEAENREEEERCLYQFESIIENSPKQIAAIIVEPVQSEGGDNHATSFFFQGLRDLTKRHGILMIVDEVQTGVGATGKFWAHEHWNLTTPPDMVTFSKKFQAAGFYFSNPELQPKQPYRQFNTWCGDPSKAILAKAIYKEIAASNLVQSTAQVGDYLFKGLQTIVAKSSGKFTNLRGENFGTFIAWDCVDADFRNKVLLACRSRGVNMGGCGDVSIRLRPTLLFEKKHADIFLNVLEDAVKSL

SEQ ID NO: 219 - protein, 472 aa, Candida parapsilosis
MTNQSISAQYFPEEPKEPVVKSTKGSNSKQAIESLGKVFDARGAYFVADYAKSLGNYIADVDGNLYLDVYAQIASIPLGYNNPALIEVAKSDKMIRAIVDRPALGNFPGNDLDEIVTDILKVAPKGQNKLWSGLSGADANELAFKATFFWYQAQKRGYNSDFSPEEVASVMHNQAPGAPELAILSFERAFHGRLFASGSTTCSKPIHKLDLPAFKWPKAQFPSYKYPLENNVEANKKEDERCLKIVEDLFKTWSVPIAGVLVEPIQSEGGDNHASAEFFQGLRDITLKHGALLIMDEVQTGVGATGVMWAHERFNLQPPPDLVTFSKKFQSAGYFYHDPEITPNMAYRQFNTWCGDPARMTLAGAIGKEIVKHDLTARASEVGDYLYKKLEKLQEKYPKHMRDLRGKDRATFIAWSLENSAARNKFLSDMKEVGVNIGGCAEDSVRLRPTLVFEEKHADILVDAIDKVLSNF

SEQ ID NO: 220 - protein, 491 aa, Scheffersomyces stipitis
MLRASANALARRASARSLSSVAAKYFPSEPAHPQLVTPAIPGPKSIQLNNDLGEKFDNRATYFVADYKNSLGNYISDADGNKLLDVYCQIASIGLGYNNPALIEAAKSDEMVYALIDRPALACFPSTTYKEILEDGILAAAPPSMSRVWTALSGSDANETAYKAAFMYQHAKLRGDQDFSSEELTSVMDNATPGASEMKILSFDKGFHGRLFGSLSTTRSKAIHKLDIPAFQWPKAPFPKLKYPLDEFATENHAEELACLEAFEDILSQHKGASKVAAIIVEPVQAEGGDNHASSFFFQGLRDITIKHDVLMIVDEVQTGVGATGKMWAHEHWNLTTPPDMVTFSKKFQAAGFYYSNPQLQPNQPYRQFNTWCGDPSKAIIAKTIYQEIVKNDLVTRTAAVGDYLYGGLQLLASKYPAHIKNLRGENFGTFIAWDCRDAGARNEILIKCRDRGVNVGGCGDMAIRMRPTLTFEEKHANVFLQVLEDVLNYM

SEQ ID NO: 221 - protein, 470 aa, Scheffersomyces stipitis
MSISSLYFPTEPAAPQVVSSSPGPKSQAAITALGNVFDSRAAYFVSDYEKSVGNYLVDVDGNTYLDVYAQIASIPLGYNNPALIEAAKSDKMIRAIVDRPALGNFPGKDSEEIIAEILKVAPKGQDKLWSGLSGADANELAFKAVFFWYQSKKRGYTTQFTAEENESVMKNQAPGSPDLAILSFERAFHGRLFASGSTTCSKPIHKLDLPSFNWPKAEFPSYKYPLDQNETENAAEDARCLSIVENLFNTWKVPIAGLLVEPIQSEGGDNHASKAFLQGLRDITLKHGALMIVDEVQTGVGATGKLWAHEHFDISPVPDLVTFSKKFQSAGYFFHDPELVPNFAYRQFNTWCGDPARMILAGAIGHEVVKHDLPAVAKRVGDYLYKKLEALQTKYPKYIRDLRGKDRATFIAWSLADVTARNKFLADMKTVGVNIGGCAEDSVRLRPTLVFEEKHADILVDAIDKILSGY

SEQ ID NO: 222 - protein, 485 aa, Lodderomyces elongisporus
MLRSSRSKPFQRLVRFNSTKYFPTEPPAPILATKTIPGPKSQKINEELGKVYDNGATYFVADYFNSLGNFISDADGNKMLDVYCQISSIALGYNNPKLIEAAKSDEMISSIVNRPALACFPQSNYKDILEEGLLAAAPPGMNRIWTALSGSDANETAFKAAFMYQHAKLRQTKEFTAEELSSVMDNKTPGASDMVILSFDKGFHGRTFGALATTRSKAIHKLDIPTFPWPKAEFPQLKYPLDQFEAENRAEEQRCLDQLEEIIVNSPKQIAAAIVEPVQSEGGDNHATSFFFQGIRDITKKHGVLFIVDEVQTGVGATGKFWAHEHWNLTSPPDMVTFSKKFQAAGFYFGNSELQPKQPYRQFNTWCGDPSKAILAKAIYKEIVASDLVTATEKVGDYLYKGLQTIFAKRSDLFTNLRGENYGTFIAWDCVNVDVRAQVLQGVKEKGVNMGACGDVSIRLRPTLLFEKKHADVFLNILEDTVGNL

SEQ ID NO: 223 - protein, 472 aa, Lodderomyces elongisporus
MTVASISAEYFPQEPKAPVVASATHEKSKEAIAKLDKNFDARGAYFVADYAKSTGNYIADVDGNYYLDVYAQIASIPLGYNNPALIEVAKSDKMIRAIVDRPALGNFPGADLNEIVEEILKVAPKGQDKVWSGLSGADANELAFKAVFFWYQAQKRGYKSNFSAEEMESVMHNQAPGSPELAILSFERAFHGRLFASGSTTCSKPIHKLDLPAFKWPKAEFPSYKYPLEENVEVNKKEDERCLKIVEELFTTWKVPIAGVLVEPIQSEGGDNHASAEFFQGLRDVTLKHGALLIMDEVQTGVGATGVMWAHERFNLQPPPDLVTFSKKFQSAGYFFHDPEIVPNFAYRQFNTWCGDPARMILAGGIGKEILKHDLVSRAATVGDYLYKKLEALQKKFPTYLRDLRGKDRATFIAWSLENAEARNKFLSDMKTVGVNIGGCAEDSVRLRPTLVFEEKHADILVEAIEKVLSGY

SEQ ID NO: 224 - protein, 487 aa, Candida lusitaniae
MLRARQAFLSARRATSSVAAAYYPAEPTQPNLVTETIPGPKSVSLNNELGRVFDNRASYFVTDYQNSIGNYISDADGNQMLDVYCQISSIALGYNNPELLKTAASPQMASALVNRPALACFPQKDYAAILEEGILAAAPPGTNKVWTALSGSCANETAFKAAFMYQAAKQRGSQDFTDEDLTSVMLNKAPGAPKRSILSFEKGFHGRLFGSLSTTRSKAIHKLDIPAFDWPVAPFPQLKYPLEEFAAENEAEEKRCLAEFENVVKSQPPHSIAAIIVEPVQSEGGDNHASALFFQGLRDLTLKHDILMIVDEVQTGVGASGKFWAHEHWNLTTPPDMVTFSKKFQAAGFYFSNPELQPSQPYRQFNTWCGDPSKALIAKTIYQEITKHNLVENTAATGNYLYQNLKTLFAKYPNKVFNLRGENFGTFIAWDCENPTQRNELLLKMRAVGVNIGGCGDRSIRLRPTLVFENKHADLLLEALEHSLKDL

SEQ ID NO: 225 - protein, 580 aa, Candida lusitaniae
MTEIRPKLSVMLQNSDLMILNITSQLQYHNLLLTFSFFTLLTSFFFEPNFYAWSALSLPNRNALQLALFCRCAKYFRYRMPNSVECAKLLDWPHYIKQWLDAFFHRLPPTMSICEKYFPEEPKEPKVATSFPGPKSQDAIKSLGTVFDSRPVYFVADYEKSVGNYIVDVDGNTYLDVYAQIASIPLGYNNPALIEAAKSDKMVRAIVDRPALGNFPGKDTEEIISELLKVAPKGQDKVWSGLSGADANELAFKAAFMWYQAKKRGYTASFTEEENRSVMENAAPGSPDLAILSFKRAFHGRLFASASTTCSKPVHKLDLPSFKWPKAEFPSYAYPLDANAEVNKKEDERCLVMVEEYLKHWKSPIAAVLIEPIQSEGGDNHASAFFFQGLRDLTLKYGALLIVDEVQTGVGATGKMWAHEHFNLSPAPDMVTFSKKFQSAGYYFHDPEIIPNQAYRQFNTWCGDPARMILAGAIGSEVVKHNLAEHASRVGDYLYGKLESLFSKYSELVTDLRGKNRATFIAWSFKKPELRNKFLVDMKSVGINIGGCAEDSVRLRPTLVFEEKHADILVAGIDKILSGY

SEQ ID NO: 226 - protein, 490 aa, Candida albicans
MQRTLINTSLRQVQKRFNSTSVTASYFPEEPKNPIFQTETIPGPKSIALNKELGEVYDNHATYFVTDYFNSLGNYISDADGNKLLDVYCQISSIALGYNNPELIKAAKSDEMVNAIVNRPALACFPSTNYKQILEEGLLAAAPPGMDKIWTSLSGSDANETAYKAAFMYQHAKLRGDKAFTEEELATCMENKTPGASDMSILSFDKGFHGRLFGSLSTTRSKAIHKLDIPAFPWPRAPFPQLKYPLEDFETENRDEEQGCLYQLESIIENSPSQIAAIIVEPVQSEGGDNHATSFFFQGLRDITKKHGILFIVDEVQTGVGASGKMWAYEHWNLTTPPDMVTFSKKFQAAGFYFSNPDLQPKLPYRQFNTWCGDPSKAILAKAIYQEIVKSNLVERTAEVGDYLFEKLSSILSRFPDKVFNLRGKNYGTFIAWDCSSTDLRNKILAASREQGLNMGGCGDQSIRLRPTLLFEKEHADIFLGILESVLNKL

SEQ ID NO: 227 - protein, 471 aa, Candida albicans
MSSKSVSSLYFPEEPKEPVVVDSHAKSKEIADRLGKVFDNRGVYFVADYEKSVGNYIADVDGNVYLDVYAQIASIPLGYNNPALIETAKSDKMIRAIVDRPAIGNFPGKDTDEIVSEILKVAPKGQDKVWSGLSGADANELAFKAAFFYYQAKKRGYTTQFSEEEMKSVMQNEAPGSPELAILSFERGFHGRLFASGSTTCSKPIHKLDMPSFKWPKAQFPSYKYPLDKYAEENKKEDERCLKIVDDIIQNNKIPVAAVLVEPIQSEGGDNHASAEFFQGLRDITLKHGSLLIMDEVQTGVGATGVMWAHERFNLQPPPDLVTFSKKFQSAGYFFHDPEIIPNFAYRQFNTWCGDPARMILAGAIGQEILKHDLVKRAAEVGDYLFKKLEQLQEKYPKYIKDLRGKDRATFIAWSLESGEARNKFLSDMKTVGVNIGGCAEDSVRLRPTLVFEEQHADILVSAIDKLLGSY

SEQ ID NO: 228 - protein, 499 aa, Debaryomyces hansenii
MLRVSRLYPKSRVGRALATTKRYQSSVCGAYFPDEPSRPELITERIPGPSGIKLNEDLGKVFDNRASNFVTDYFNSIGNYISDADGNKLLDVYCQISSIALGYNNPALIEMAKSDSMINALVNRPALACFPSIDYGKILNEGILAAAPPGMDKVWTALSGSCANETAYKAAFMYQEAKRRGSIDFTSEELTSVMENKAPGASEKVILSFDKGFHGRLFGSLSTTRSKAIHKLDIPAFPWPKAPFPQLKYPLDEFVNENHSEEERCLAILEDIITKKHPPHNIAAIVVEPVQSEGGDVHATPFFFQGLRDLTKKHEILMIVDEVQTGIGATGKFWAHEHWNLSEPPDMVSFSKKFQAAGFYFTDPELQPNKPFRQFNTWCGDPSKALIAKSIYQEISKNNLVQKTAQVGDYLYKSLSSVFSKYPDRIKNLRGENMGTFIAWDCVSPEERNKLLLACRTKGVNIGGCGEVTVRLRPTLVFENKHADVLANILEDSLKDLYK

SEQ ID NO: 229 - protein, 472 aa, Debaryomyces hansenii
MSICEKYFPDEPDKPVVKTSSFPGPQSQEGIKSLNKVFDSRPTYFITDYEKSIGNYIVDADGNTYLDVYAQIASIGLGYNNPALIKAAKSDKMIRAIVDRPALGNFPGKDTAEIIGDLLKVAPKGQDKIWSGLSGADANELAFKAAFMWYQGKKRGFNTPFTAEENESVMKNESPGSPDLAILSFKKAFHGRLFASGSTTCSKPIHKLDFPAFKWPKAEYPSYKYPLDKHVEENKKEDQRCLQIVDEILSTNKVPIAALLIEPIQSEGGDNHGSNEFFQGLRDLTLKYGALMIVDEVQTGVGATGKFWCHEHFNLSPPPDMVTFSKKFQSAGYYFHDPEIVPSISYRQFSTWCGDPARMILAGAICDEVVKNDLPAKAQKVGSYLFSKLEALQAKYPQYLLNLRGKDRATFIAWSFDTGAVRDQFLKDMKSVGVNMGGCSETSVRLRPTLVFEEKHADIFVAGVEKVLSSYK

SEQ ID NO: 230 - protein, 490 aa, Candida tropicalis
MLRAFRSSTLRQVSKRFNSTSVAATYFPQEPTGPVFQTESIPGPKSQELNKELGEVYDNHATYFVVDYFKSLGNYISDADGNKLLDVYCQISSIALGYNNPELIKVAKSEEMINSIVNRPALACFPSTNYKTILEDGLLAAAPPGMDRIWTALSGSDANETAYKAAFMYQHAKLRGDKPFTQEELTSSMENKLPGASDMSILSFDKGFHGRLFGSLSTTRSKAIHKLDIPAFPWPKAPFPKLKYPLSEFETENREEEQGCLYELESIIENSPSKIAAVIVEPVQSEGGDNHATSFFFQGVRDITKKHGILFIVDEVQTGVGASGKMWAHEHWNLSTPPDMVTFSKKFQAAGFYFSNPDLQPKLPYRQFNTWCGDPSKAILAKGIYQEIVKHNLVEKTAKLGDYLYKNLNDIFSKFPQKVSNLRGENFGTFIAWDCQDVDLRNKILLACRERGVNLGGCGDYSIRLRPTLVFEKKHADIFLNILEDVLSKV

SEQ ID NO: 231 - protein, 471 aa, Candida tropicalis
MSSKSVASLYFPNEPKEPTVVASHAKSDAEKAQIGKVFDNRGIYFVADYEKSQGNYIADVDGNVYLDVYAQIASIPLGYNNPALIETAKSDKMIRAIVDRPATGNFPGADINEIIGEILKVAPKGQDKVWSGLSGADANELAFKAAFFWYQAKKRGYNTQFSQEELDSVMKNEAPGSPDLAILSFERGFHGRLFASGSTTCSKPIHKLDMPSFKWPKAEFPSYKYPLDKYTEENKKEDERCLKIVDDIIANNKIPVAAVLIEPIQSEGGDNHASAEFFQGLRDITLKHGSLLIVDEVQTGVGATGIMWAHERFNLQPPPDLVTFSKKFQSAGYFFHDPEIIPNFAYRQFNTWCGDPARMILAGAIGQEVVKHDLVKRTAEVGDYLYSKLEKLAEKYPSYIRDLRGKNRGTFIAWSLENSEARNKFLSDMKTVGVNIGGCADDSVRLRPTLIFEEKHADILVAAIDKLLSTY

SEQ ID NO: 232 - protein, 489 aa, Kuraishia capsulata
MTKLWNAQLCTALGRGLRLQSTAAAYFPSEPASPVLKTTIPGPKSSERLAELGKVFDNRAAYFAANYYNSIGNYIADVDGNQYLDVYAQIASIALGYNNPEILKTAKSDQMANALANRPALACFPSSDYQQILEDGILAAAPKGMSKVWTALSGSDANETAFKAAFIYHAAKKRGNNTFSPKELESVMQNLVPGASDAAILSFEKGFHGRLFGSLSTTRSKPIHKLDIPAFNWPKAPFPSLKYPLDQFVTENKKEEERCLAEFEKVIQQWSTQIAAIIIEPIQSEGGDNHASPSFFQSLRDLTLKYDILMIVDEVQTGVGASGKFWAHEHWNLTTPPDMVTFSKKFQAAGFYFALPELQPSLPFRQFNTWCGDPSKALIARTVYQEISKYNLVENAATTGAYLYGKLESLSGEYSSIFNLRGQSTGTFIAWDMSSSAKRDMFLIESRKLGLNIGGCGDVSVRLRPTLVFEEKHADVLVDIAEEALKRLG

SEQ ID NO: 233 - protein, 476 aa, Kuraishia capsulata
MSVPEVTPAEVYYPNEPAAPSVQTAEIPGPKTKKALEELAEVFDARCAYFVADYDKSVGNYIADVDGNVFLDVYAQIASIALGYNNPALIEAAKSDRMISALVQRPALGNFPSAEFADILKDILKVAPKGQTKLWSGLSGADANELAFKAVFMNYQAKKRGYNTSFTTEEETSVMENAIPGSPELAIMSFERAFHGRLFATASVTRSKPIHKLDMPSFHWPKAEFPSYKYPLEDNEAANKAEDERCLKIVEELYKTWHCPIAGLIVEPIQSEGGDNHGSTAFFQGLRDITLKYNSLLIMDEVQTGVAATGEMWAHERFNLSPPADLVTFSKKFQSAGYFYHDPELTPNLPYRQFNTWCGDPTKMIIAGAIAKEVVEKDLAKKISVVGDYLYAALAELSKKYPTEILNLRGKDRACFIAWDSPSPAARNAFLVNMKKNGVNIGGCAETGIRLRPTLTFGKKHADILIQAIDKTLGEN

SEQ ID NO: 234 - protein, 509 aa, Pichia farinosa
MGMSSKRGYIQGKVIANCVGKRVFLNGGVARRPYSSVAEEYFPDEPSKPVVTSSQIPGPSSIKLTKELGRSFDSNASYFISDYFNSKGNYISDADGNKLLDVYAQIASIPLGYNNPALIETARSDVMVNALVNRPALACFPSIDYGKILSEGILAAAPKGMGHVWTALSGSCANETAFKAAFIYQNAKRRGSLDVSAEELASCMDNKPPGSSDMVILSFDKGFHGRLFGSLSATRSKPIHKLDMPAFPWPRAPFPQLKYPLKDHVKENHEEEERCLAELENIITKKVAPNKIAAIIVEPVQSEGGDNHASSFFFQSLRDITLKHEILLIVDEVQTGVGASGKFWAHEHWNLSTPPDMVTFSKKFQAAGFYFSDPKLQPKEPYRQFNTWCGDPSKALLARSIYQEITKNDLVTKTAEVGSYIYENLEAMFSKYEGHVQNLRGKNYGTFIAWDHSSPAERDQFISLCRSKGLNIGGCGSAAVRLRPCLVFGKKHADIMLSIIEDVLKTLRG

SEQ ID NO: 235 - protein, 470 aa, Pichia farinosa
MSSGNYFTNEPKEPVVKSETVPGPQSSAGIKALGQVTDSRPVYFIADYEKSVGNYIADVDGNVYLDVYAQIASNPLGYNNPALIETAKSDKMIRAIVDRPALGNFPGADTAEIIQGLLDMAPKGQDKVWSGLSGADANELAFKAAFMWYQGKKRGFTKGFNEEELKSVMSNSAPGSPELAILSFERAFHGRLFASGSATRSKPIHKLDLPAFKWPKAEFPSYKYPLDKYEAENKKEDERCLAIVDDILKSWSIPVAGVLIEPIQSEGGDNHASKEFFQGLRDLTLKHGTLMIVDEVQTGVGATGKMWCHEHFDLSPAPDIVTFSKKFQSAGYFFHDPEIMPAQAYRQFNTWCGDPARMILAGAIGKEIAKNNLVQRTKEVGQYMYSKLEALSSKYPKYIKNLRGKDRGTFIAWSLESGEARDKFLKDLKTKGVNMGGCAESSVRLRPTLVFEEKHVDILIQKIDQLLASY

SEQ ID NO: 236 - protein, 498 aa, Aspergillus niger
MAAIFRSSLRLRPTTRLSAVRTLTTTPHMRAAEQPYFPDEPSAPKLATAIPGPNNKAAAAKLDKVFDVRSLNMLADYYKSNGNYIADLDGNVLLDVYAQIASIPVGYNNPHLRKVAESPEMVNALINRPALGNFPSHDWADILDTGILKAAPKGLNQVFTALAGSDANETAYKAAFMYYRQRERGGAETEFTEEELETTMKNQSPGSPQLSIMSFKSAFHGRLFGSLSTTRSKPIHKLDIPAFDWPQAPFPSLKYPLEEHAQENAQEEQRCLQETERLIKEWHNPVAAVVVEPIQSEGGDNHASPAFFRGLREITKRNNVLFIVDEVQTGVGATGKFWAHDHWNLETPPDMVTFSKKAQTAGYYYGNPALRPNKPYRQFNTWMGDPARALIFRGIIEEIERLKLVENTAATGDYLFSGLERLAKQYPEHLQNLRGKGQGTFIAWDTPKRDEFLVKAKGVGVNIGGSGQSAVRLRPMLVFQKHHADILLESVEKIIKQL

SEQ ID NO: 237 - protein, 498 aa, Aspergillus nidulans
MASAFRSSLKLRASARLPAVRTITTTPRLRAAEKPYFPNEPTAPKLATAIPGPKNKAASEQLNEVFDVRSLNMLADYTKSVGNYIADLDGNMLLDVYAQIASIPVGYNNPHLLKVAASPEMATSLINRPALGNFPSADWAHILKTGILKVAPKGLDQVFTAMAGSDANETAYKAAFMYYRQQQRGGPEKEFTEEEIQSSMLNQTPGSPQLSIMSFKAGFHGRLFGSLSTTRSKPIHKLDIPAFDWPQAPFPSLKYPLEEHAKENAEEEQRCLQEAERLIKEWHNPVAAIIVEPIQSEGGDNHASPAFFRGLREITKRNNVLFIVDEVQTGVGATGKFWAHDHWNLETPPDMVTFSKKAQTAGYYFGNPALRPNKPYRQFNTWMGDPSRALIFRGIIEEIERLFLVENTAATGDYLYSGLERLAKQYPEHLQNLRGKGQGTFIAWDTPKRDEFLVKGKGVGINIGGSGQNAVRLRPMLIFQKHHADILLESIEKIIKQL

SEQ ID NO: 238 - protein, 500 aa, Sus scrofa
MASVLLTRRLACSFRHNHRLLVPGWRHISQAAAKVDVEFDYDGPLMKTEVPGPRSRELMKQLNIIQNAEAVHFFCNYEESRGNYLVDVDGNRMLDLYSQISSIPIGYSHPALVKLVQQPQNVSTFINRPALGILPPENFVEKLRESLLSVAPKGMSQLITMACGSCSNENAFKTIFMWYRSKERGQSAFSKEELETCMINQAPGCPDYSILSFMGAFHGRTMGCLATTHSKAIHKIDIPSFDWPIAPFPRLKYPLEEFVKENQQEEARCLEEVEDLIVKYRKKKKTVAGIIVEPIQSEGGDNHASDDFFRKLRDISRKHGCAFLVDEVQTGGGSTGKFWAHEHWGLDDPADVMTFSKKMMTGGFFHKEEFRPNAPYRIFNTWLGDPSKNLLLAEVINIIKREDLLSNAAHAGKVLLTGLLDLQARYPQFISRVRGRGTFCSFDTPDESIRNKLISIARNKGVMLGGCGDKSIRFRPTLVFRDHHAHLFLNIFSDILADFK

SEQ ID NO: 239 - DNA, 1400 bp, Pichia membranifaciens
atgtccatctccgaatcctacttcccaaccgaaccaaagggtccagaggttaagaccgcaatccctggtccaaagtccaacgcaaagttggcggaattggcttccgtttacgacaccaaggctgcttacttcgttaccgactactacaactccttgggtaactacatctgtgacgcagacggtaacaagttgttggactcctactgtcaaatctcctccatcgccttgggttacaacaaccctgcattgttgaagatggctcactctgccgaaatggcagttgcattgtgtaacagacctgctttggcctgtttcccatctaccgactactacgacatcttgaaggaaggtttgttgtccgtcgcaccaaagggtttggacaaggtttgtaccgctcacaccggttccgacgcaaacgaaatggctttcaaagcggcattgatgtaccaagcaaacaagaagagaggtggcaagccattcacccaagaagaattgatctccgtcatggagaaccagttgcctggcacctccgacatggttatcttgtccttcgaaaaggctttccacggtagattgttcggttctttgtccactaccagatccaaggctatccacaagttggacatcccagctttcgactggccaaaggctccattcccaaccttgaagtacccattggaaaagtacgaggcggaaaacaaggcagaggaagagagatgtttgcaagaattggacgctatcatcaccaactacccatccaagatcgcagcagccatcgttgaaccagttcaatccgaaggtggtgacaaccacgcatccccagctttcttccaaggtatcagagccatcaccaagaagcacgacgttttgatgatcatcgacgaagttcaaactggtggcggtggttccggtaagatgtggttgcacgaacactacgacgttaccccagacatcatgaccttctccaagaagatgcaaaacgcaggtttcttcttctccgaagaaggtttggctggtgaccagccattcagacaattcaacacctggtgtggtgacccatccaaagccttgatcgcaaaggcaatcatcggtcaaatcaaggagaaggacttgttgaagaacgctgcagaaaccggtgactacttgtactccaagttggccttgatcggtgaaaagaactccaagttgttgaacttgagaggtaagggtagaggtttcttcatcgcattcgacttgccaaccgcagccgaaagaaaccaattgttgggtgaatgtaagaagttgggtttgaacatcggtggttgtggtgaccaaggtgttagattgagaccagcattggtcttcggtaagaagcacgcagacatcttggcggacatcgtcggtaaggctttcgaaaagtt

SEQ ID NO: 240 - DNA, 1440 bp, Candida arabinofermentans
atgtccaccatcgcagaaaagtactacccatccgagcctgaaaagccagttatcaagaccgcaatccctggcccagtttcccaggagatgttgaagcagttgtccggtgtctacgacaccaaagcctcctactacgttgcagactactacaactccatcggtaactacatctgtgacgcagacggcaacatgttgttggacgcttactgccaaatcgcttccatcgccttgggttacaacaaccctgaaatcttgaagactaccaagtccgaccaaatgtccgttgcattggccaacagaccagctttggcatgtttcccatccaccgactactacaagatcttggaagaaggtttgttggccgttgcaccaaagggtttcaccagagttttgaccgcacacaccggctccgacgccaacgaaatggctttcaaggcagctttcatctggcaagcaaccaagaagagaggtgacgcatccttcaccgcagaagaattgtcctccgtcatggacaacaagttgcctggcacctccgacatggtcatcttgtccttcgacaagggtttccacggtcgtttgttcggttccttgtccactaccagatccaaggcaatccacaagttggacatcccagcgttcaactggcctaaggcaccatacccagcattgaagtacccattggaagaacacgaagcagagaacagagctgaagaacaaagatgtttggacgccttcgaaaccatcgtttcccagtggccaggtaagatcgctgcaaccatcatcgaaccagttcagtccgaaggtggtgacaaccacgcttccccattcttcttccaaggtttgagagacttgactaccaagcacggtatcttgtacatcatcgacgaagttcaaaccggtggtggtgcttccggcaagatgtggttgcacgaacactacggtatctccccagacatcgttaccttctccaagaagatgcaaaacgcaggcttctacttcaaggacaaggaaatcgaaggtgcaatgccattcagacaattcaacacctggtgtggtgacccatccaaggcattgatcgcaagaaccatctgtcaagaaatcatgaacaacgacttgttggacaacacctccaaggttggtgcttacttgtactccaagttggaagacatccaaaagtcctacccaaagttggtttccaacttgagaggtaaggacagaggtcacttcatctcttggaccatgccaaacgcatccatcagagacaagttcttgttcatctgcagacagaacggtttgaacatcggtgcttgtggtgacgaatccgttagattgagaccaaccttgaccttcggtgttaagcacaccgacatcttgatcgacatcgtctccaaggctttgtcccaattgtccgttttggaagacgttttcaagaccttgtga

SEQ ID NO: 241 - DNA, 1410 bp, Brettanomyces bruxellensis
atgggtgtctccgacttgtacttcccagacgaaccaaagggtccatccatgaagaccaagtgtccaggtccagagaccgaggctaagttggctgaattgtccaccgtcttcgacaccaagaacgcaatcttcgtcgcagacttctacaactccttgggtaactacatctgtgacgccgacggtaacatcttgttggacgcttactgtcaaatctcctccatcgcattgggttacaacaacccagaattgttgaagactaccaagaccaaggaaatgtccgtcgcattggcaaacagaccagcattggcatgtttcccatccaccgactactacaagatcttgaaggagggtttgttgtccgtcgcaccagaaggtttggacaaggtctacactgcccacaccggttccgacgcaaacgaaatggcattcaaggctgctttgttgtaccaagcaaccaagaagagaggtggtaagccattcaccgaagaagagaaggcatccgtcatgaagaacgagttcccaggtgcctccgacatggctatcttgtccttcaccaagggtttccacggtcgtttgttcggttccttgtccactacccactccaagccaatccacaagttggacatgcctgcattcaagtggccagttgccccattcccagtcttgaagtacccattggaagaccacgtcgaagaaaacaaggaagaggaagcaaactgtttgaaggaattggaccacatcttggcaacctaccctcaccaaattgcggctgcaatcatcgaaccagttcaatccgagggtggcgacaaccacgcttcccctaccttcttcaagggtgtcagagaattgaccaagaagcacggcgttttgatgatcgtcgacgaagttcaatgtggtggtggtggttccggtaagatctggttgcaccaacactacggtatcaccccagacatcatgaccttctccaagaagatgcaaaatgccggtttcttcttccacgacccagcgatcgctggtgacaccccatccagacaattcaacacctggttcggtgacccatccaaggcattgatcgctcgtaccatcgtccacgagatcaagaagaaccacttgttggacgaagttaccaagaccggtgactacttgtactccaagttggacgctatcagaaagaagcacttgaagttgatgttgaacttgagaggtcaacacagaggtttcttcgtcggcttcgacttgcctaccgtcgaattgagagacaagttcatctacacctgtagacagaagggtttgaacttgggtggttgtggtgacaaggctgtcagattgagaccagccttggttttccaaccaaagcacgtcgacatcttggctaagatcatggaagaatccttcgacaccttggaataa

SEQ ID NO: 242 - DNA, 1479 bp, Candida guilliermondii
atgttgcgttccgtccacagaactacctccgcagcaagaatcgctcaattggcgaagagatactcatcttacgcttcctccgtcttcccagacgaaccatccgttccacagttgaagaccgaagttcctggtccaatcggcacccagttgaacaccaacttgggtgacgttttcgacaacagagcagcttacttcgttaccgactactacaactccatcggtaactacatctccgacgcagacggcaacaagttgttggacgtttacatgcaaatcgcatctatcggtttgggttacaacaacccagctttgaagcaagtcgctaagtccgacgaaatgactaccgctttgatcaacagaccagccttggcatgtttccctggtgttgactaccagaaggttttggaggacggcatcttgaaagccgctccacctggtatgaccaaggtctggaccgctactaccggttccgacgccaacgaaaccgccttcaaggctgctttcatgttgcaagctgcgagagacagaggctccagagacttcaaccaacaggagttgatctcagttatgaacaacgaagcccctggtgcttccgaaaagtgtatcttgtctttcgacaaagccttccacggtcgtttgttcggttccttgtccactaccagatccaaggctatccacaagttggacatccctgctttcccatggccaaaagccccattcccagctttgaagtacccattgaaggacttcgaaaacgaaaacaagcaagaagaaaacagatgcttggaacaattggaggacatcatcgttggtaagggtaagggtaacatcgctgctttgatcgttgaaccagttcaatccgaaggtggtgacaaccacgcttccgcatctttcttccaaggtgttagagacatcaccttgaagcacaacatcttcatgatcgttgacgaagttcaaaccggtgttgctgcaaccggtaagttctgggctcacgaacactggaacttgtccaccccaccagacatggtcaccttctctaagaagttccaagctgctggtttctacttccgtgacccagagttgcaacctcgtcaagcatacagacaattcaacacctggtgtggtgacccatccaaggcattgattgcgcgtaccatcgttcaggaaatcgaagcaaacaacttggttgctgcaaccgcatctgttggtgactacttgttcaacaacttgtcctccttgttcgaaaagtacccaggtcacgcttccaacatccgtggtcaaaacatgggcaccttcatcgcttgggactccccaaacgcagatcaccgtgccaagttcttgttggcatgcagagctaagggtgtcaacatcggtggttgtggtgaagcagcaatcagattgcgtccatccttggcattcaacgaatcccacgcagacgttttgtgcggtatcatcgaaaacgttttgggtgaaatgtaa

SEQ ID NO: 243 - DNA, 1461 bp, Candida parapsilosis
atgttgagaagagcaagaccaatttccaagtttgttgttagatttaattcaacagcagctagatatttcccatcggaaccacaagctcccatagtttcaactgaatcaattcctggtcctaaatccattgccatcaacaatgaattgggtacagtatttgacaatggagccacttattttgtggctgattatttcaaatcattaggaaattatattagtgatgctgatggaaacaaattacttgatgtatattgtcaaatttcatcaattgctttgggttacaataaccccaagttgattgaagcggctaaatcggacgaaatgacatcggcaattgttaatcgtccagcattggcgtgtttcccctcgacaaattataaggatattcttcaacaaggtttattggctgctgccccttctggaatgaataagatttggacatcattgagcggatcagatgccaatgaaactgcatacaaggctgcatttatgtatcaacatgccaagttgagacaaactgatgggtttactgaagaagaattgaccagtgtcatgaataatgaaactcctggtgcttccgatatggtgattttgtcgtttgataaaggattccatggaagattatttggttcattatcaactaccagatcaaaagctatccataaattggacattcctgcattcccatggccaaaagctccattccctcaattgaaataccccttggaagaatttgaagctgaaaatagagaagaagaagaaaggtgcttgtatcaatttgaatcaattattgaaaattcaccaaaacaaattgctgccattattgttgaaccagttcagtctgaaggtggagataatcatgctacgctgtttttctttcaaggtttaagagacttgaccaagagacacggcatattgatgattgttgatgaagtccaaactggtgttggtgccactggtaagttttgggctcatgaacattggaacttgactacaccaccagatatggttacattttccaaaaagtttcaagctgctggattctatttcagtaaccccgaattgcaaccaaaacaaccatatagacaattcaacacatggtgtggagatccatcaaaggccattttagctaaagcaatctacaaggaaattgctgcatccaacttggttcagagtacagcacaagttggtgattacttgtttaaaggattacaaacaattgtcgctaaatcaagtggtaaatttaccaatttgagaggtgaaaatttcggtacttttattgcttgggattgtgttgatgctgatttcagaaacaaggttttgcttgcttgtagaagtcgtggggttaatatgggtggatgtggtgatgtttcaattagattgagacctacgttgttgtttgaaaagaaacacgctgatatctttttgaatgttttggaagatgctgtcaagagtttgtaa

SEQ ID NO: 244 - DNA, 1476 bp, Scheffersomyces stipitis
atgcttagagccagtgccaatgctcttgccagaagagcctccgctcgttctttatcctcggtcgctgcgaagtactttccctccgagccagcacatccgcagcttgtgactccagcaattccagggcccaagtccatccaattgaataacgatttgggagagaaattcgacaacagagccacatacttcgttgcagactacaagaattccttgggtaactatatcagcgatgctgacggcaacaagttgttagatgtctactgtcagatcgcatcgattgggttgggctacaacaatccagccttgattgaggctgcgaaatctgacgaaatggtatatgccttaattgaccgtcccgctttggcttgtttcccttctactacatacaaggagatattagaggacggaatcctcgctgctgccccacccagtatgtccagagtgtggactgcgctttcgggctctgatgccaacgaaactgcctacaaggctgcgttcatgtaccaacacgccaagttgagaggcgatcaggacttctcgtctgaagaattgacctctgttatggacaatgccactcctggcgcttccgagatgaagatcttgtcgtttgacaaaggcttccacggcagattgtttggttcattgtctaccaccagatccaaggctattcacaagttggacattcctgcattccaatggcccaaggcacctttccccaagttgaagtatccattagacgagtttgctactgagaatcacgccgaagaactcgcctgcttggaagcatttgaagacattcttagccaacacaagggtgctagtaaagttgctgccattatcgtggaaccagtccaggctgaaggcggagacaaccatgcctcttcattcttcttccaaggattgagagatatcaccataaagcacgacgtgttgatgattgtagatgaagtacagaccggagtaggtgccacgggtaaaatgtgggctcatgaacattggaacttaaccactcctccagacatggtaacgttctccaagaaattccaggcagctggtttctactacagcaacccacagttgcagcccaaccaaccttacagacagtttaacacctggtgcggagatccatctaaggccatcattgccaagaccatctaccaggaaatcgtcaaaaacgacttggtcaccagaactgctgctgtaggagactatttgtatggtggtttacaattgcttgcctccaagtatcctgcccacatcaagaacttgagaggtgagaacttcggtacttttattgcctgggactgcagagacgccggagccagaaacgaaattttgatcaaatgccgtgatagaggtgtcaatgttggtggctgtggcgatatggctattcgtatgagacccaccttgacgttcgaggaaaagcatgccaacgtgttcctccaagttttggaagacgtattgaattacatgtga

SEQ ID NO: 245 - DNA, 1458 bp, Lodderomyces elongisporus
atgcttagaagctcgaggtcaaagccatttcagaggttggttagattcaactcgaccaagtacttccccacagaacctccagcaccaatccttgcaacaaaaactattccaggccccaaatctcaaaagatcaatgaagaattgggtaaagtttatgataatggtgctacatactttgttgccgactacttcaactcattgggtaatttcataagtgatgctgatggtaataagatgttggatgtctactgccaaatctcgtcgattgccttgggttataataaccccaaattgattgaagcagccaaatctgatgaaatgatttcgtcgattgttaatcgtccagcattggcgtgttttccacaaagcaattacaaggatattcttgaagaagggttattggctgcagcaccaccaggcatgaataggatctggacagcattgagtggatccgatgctaatgaaactgcgttcaaggctgcatttatgtatcaacatgctaaattgagacaaaccaaggaatttactgccgaggaattgtctagtgttatggataacaagactcccggtgcttcagatatggtgattttgtcttttgacaaggggttccacggtagaacatttggtgcattggcaactactagatcaaaagcaatccacaaattagatattcccacattcccatggcccaaggcagagttcccacagctcaagtacccattggatcaatttgaggcagagaacagagctgaggagcaaagatgcttggatcaattagaagaaataattgtcaactcgccaaaacaaatagccgcggcaattgttgagcccgttcagtctgaaggtggtgataaccatgccactagtttctttttccaaggtattcgtgacattaccaagaaacatggtgttttattcattgttgatgaggtgcagacgggtgttggtgcaactggtaagttttgggctcatgagcactggaacttgacgtcaccacccgatatggttacttttagtaagaaattccaagcagcaggtttctactttggtaactctgaattacaaccaaaacaaccatataggcaatttaacacatggtgtggagatccatcaaaagccatcttggccaaggctatttacaaagagattgttgcttcagatttggttactgctactgaaaaagttggtgattatttgtacaaaggattgcaaactatttttgctaagagaagcgacttgtttaccaacttacggggtgaaaactacggaacctttattgcatgggattgtgtcaatgttgatgttagagcccaagtgttgcaaggcgtgaaggaaaaaggagttaacatgggtgcttgtggtgacgtatcaattagattgagaccaacattgttgtttgaaaagaaacacgcagatgtgtttttgaatattttggaagacactgttggtaatctctaa

SEQ ID NO: 246 - DNA, 1464 bp, Candida lusitaniae
atgctcagagccaggcaagccttcctttctgctcgccgtgctacttcttctgttgcggcggcctactatccagccgagcctacccagcccaatttagtcactgagaccattccaggaccaaagtctgttctgctcaacaatgaacttgggcgtgttttcgacaacagggcgtcctacttcgtcacagactaccaaaactcgattggtaactacatttctgacgccgacggcaaccagatgttggatgtgtattgtcaaatctcttcgattgcgcttggatacaacaatcctgagcttttgaaaacggccgcgtctccacaaatggccagcgcattggtcaaccgtcccgccttggcatgtttcccacaaaaagattacgcggccattttggaggaaggtatcttggctgccgctcctccaggcaccaataaagtatggacggcattgtctggatcctgtgccaacgaaactgcattcaaagctgcgttcatgtaccaggcagccaagcaacggggatcccaggacttcactgacgaagacttgacttctgtcatgttgaacaaggcgcctggtgcgcctaaaagactgatcttgtcgttcgagaaaggtttccacggccgtttgttcggctctttgtccacgactcgttcgaaagccattcacaagttggacattccagcctttgattggcctgtggctcccttccctcagttgaagtatccgttggaggaatttgctgcggagaatgaggcagaagagaagagatgtttggcagagttcgagaatgtcgtcaagtctcagcctcctcactccattgccgcaatcattgtggagccagttcaatccgagggtggagacaaccacgcttctgctctctttttccaaggtttgcgtgacctcactttgaaacacgatattctcatgattgtggatgaagtgcagaccggagttggtgcctcgggtaagttctgggcccacgaacactggaacttgaccactcctcccgacatggtgacattttccaagaaattccaggctgccggattttacttctccaacccagagttgcagccttctcagccatacagacaattcaacacatggtgtggtgatccatccaaggcccttattgccaagacaatttaccaggaaatcaccaagcacaacttggtggagaatactgcagcaacaggtaactacttataccaaaacttgaagactttgtttgccaagtacccaaacaaggttttcaacttgcgtggtgaaaacttcggcacgtttattgcatgggactgtgaaaatccaacacagagaaatgagttgttgttgaaaatgcgtgctgtgggagtgaatattggtggctgcggcgacagatccatcagattgagacctacgttagtctttgagaacaagcacgcggacttacttttggaagcgttggagcattccttgaaagacttgtaa

SEQ ID NO: 247 - DNA, 1473 bp, Candida albicans
atgcagagaacactcatcaatacttcgttgaggcaagttcaaaagagatttaattcaacttctgtgactgcaagctatttccctgaagaacccaaaaacccaatatttcagacggaaacaatccccggtcccaaatcaattgctttaaacaaagagcttggtgaagtttatgataatcatgcaacttactttgtgaccgattacttcaactctttagggaattatattagtgatgctgatggtaacaaattgttagatgtttattgtcaaatttcatcaattgctttgggttataataatccagaattaataaaggcagccaaatcagacgaaatggtcaatgcgattgttaatcgtccagctttggcatgtttcccatctaccaattacaaacaaattcttgaagagggtcttttagcagctgcgccaccaggaatggacaaaatatggacatcattaagtggatctgatgccaatgaaactgcatacaaggcagcatttatgtatcaacatgcaaaattaagaggtgataaggcatttactgaagaagaacttgccacatgtatggaaaacaaaacccctggtgcctctgacatgtctattttatcatttgataaagggttccatgggagattgtttggttctttgtcaactacaagatccaaagcaattcataagttggatattcctgctttcccatggccaagagccccatttccacaattgaagtatccattagaagattttgaaacagaaaacagagatgaagaacaaggttgtttgtatcagttggaatcaataattgaaaactctccaagtcaaattgcagccattatcgtggaaccagttcaatcagaaggaggtgacaatcatgccacgtcattcttctttcaaggtctcagagacattaccaaaaaacatggaattttattcattgtggacgaagtccaaactggtgttggggcatcaggaaaaatgtgggcctatgagcattggaatttgactactcctccagatatggtgacattttccaaaaaatttcaggctgctggattctatttcagtaatcctgatttacaaccaaaattgccatatagacagttcaatacttggtgtggtgacccatccaaagccattttggcaaaggccatctatcaagaaattgtcaaatctaacttggtggaaagaactgctgaggttggtgattatttatttgagaaattactgtcaatcttatcaagatttcctgataaagtcttcaatttgagaggaaagaactatggtacatttattgcctgggactgttcaagcactgaccttagaaacaaaatattggcagcatcaagagaacaaggacttaatatgggtggctgtggtgatcaatcaatcagattaagaccaactttattgtttgaaaaagagcatgctgatatatttcttggtattttagaatcagttttgaacaaattgtga

SEQ ID NO: 248 - DNA, 1500 bp, Debaryomyces hansenii
atgcttagagtttcacgtttatacccaaaaagccgtgttggtagagcattagcaaccactaaacggtatcaatcttcagtatgcggggcatattttccagatgagccatcaagaccagaattgattactgaaagaattcctggtcccagtggaatcaaattgaacgaagatttgggtaaggtgttcgataacagagcatccaattttgttacagactattttaattccatcgggaattatatttcagatgcggatggtaataagttgcttgatgtttattgccaaatttcttcgattgcgttgggatataacaacccagcattgatcgagatggctaagctggattccatgatcaatgcgttagtaaacagacctgcattggcatgttttccttcgattgactacggaaagatattgaatgaaggaattttagcagctgctcctccgggaatggacaaggtatggacagccctttcaggatcatgtgccaatgagactgcttataaagctgcatttatgtaccaagaggcgaaacgcaggggctcaattgacttcactagtgaagagttgacgtctgttatggaaaacaaagcgcctggtgcatcggaaaaggtaattttgtcgtttgataagggtttccatgggagacttttcgggtcattatccactaccaggtcaaaagccattcataagttggatattccagcatttccatggcctaaagcaccttttccacaattgaagtacccattggatgagtttgttaacgaaaaccattccgaggaagaacgttgtcttgcaatccttgaagacattatcaccaagaaacatccacctcataatattgcagctattgtggtcgaaccagtacagtctgaaggaggtgatgttcatgccactccgtttttcttccaaggattaagagacttgaccaagaaacatgaaatattaatgattgttgatgaagtccagactgggataggggcaacaggtaagttttgggctcacgaacactggaatttatcagaacctcctgacatggtatccttttcgaagaagttccaagctgcgggattctacttcactgatccagagttacagccaaacaagccgttcagacagttcaacacctggtgtggcgatccatccaaagcattgattgctaaaagtatctaccaagaaatttccaaaaacaatcttgtacagaagacggcacaagtcggagactacttatataagagcttatcctcagttttctctaagtacccagacagaattaaaaacttgagaggtgaaaacatgggtacttttattgcttgggattgtgtcagtccagaagaaagaaacaaattattattggcatgtcgtaccaagggtgttaacattggtggatgtggagaagttaccgttagattaagacctactttggttttcgaaaacaagcatgcagatgtcttagctaatatattagaggacagcttaaaagacttatataaataa

SEQ ID NO: 249 - DNA, 1473 bp, Candida tropicalis
atgcttagagcttttagatcatctactttgagacaggtctcaaagagattcaattctacttctgttgctgcaacctatttcccacaagaaccaactggtccagttttccaaactgaatcaatccctggtccaaaatcccaagaattaaataaagaattgggtgaagtttatgacaatcatgctacttattttgtcgttgattatttcaaatcattaggtaattatattagtgatgctgatggcaataaattattggatgtttattgtcaaatttcttcaattgctttgggttataataatcctgaattgattaaagttgctaaatctgaagaaatgattaattcaattgttaatcgtcctgcattggcatgtttcccttctactaattataaaaccattcttgaagatggtttattagctgctgctcctccaggtatggatagaatttggacagctttaagtggttcagatgccaatgaaactgcttataaagccgctttcatgtatcaacatgctaaattaagaggtgataaaccatttactcaagaagaattgacttcttcaatggaaaataaattacctggtgcttcggatatgagcattttatcatttgataaaggattccatggtagattatttggttctttatcaactactagatcaaaagctattcataaattagatatccctgctttcccatggccaaaagccccattcccaaaattgaaatatccattatctgaatttgaaactgaaaatagagaagaagaacaaggttgtttatatgaattagaatcaattattgaaaattctccatctaaaattgctgccgttattgttgaaccagttcaatctgaaggtggtgataatcatgctacatcctttttcttccaaggtgttagagatattactaaaaaacatggaattttatttattgttgatgaagttcaaactggtgttggtgcatcaggtaaaatgtgggctcatgaacattggaatttatcaactcctccagatatggtcacgttttctaagaagttccaagctgctggattttatttcagtaatcctgatttacaacctaaattaccttatagacaatttaacacttggtgtggtgatccatctaaagcaattttggccaagggtatttatcaagaaattgttaaacataacttggttgaaaaaactgctaaattaggtgattacttatacaagaatttgaatgatattttctccaaattcccacaaaaagtttccaatttaagaggtgaaaatttcggtacttttattgcatgggattgtcaagatgttgatcttagaaataaaatcttgttggcctgtagagaacgtggagtcaatttgggtggttgtggtgattactcaattagattaagacctactttggtatttgaaaagaaacatgccgatattttcttgaatattttagaagatgttttatcaaaagtttga

SEQ ID NO: 250 - DNA, 1470 bp, Kuraishia capsulata
atgacgaagctttggaacgcccaactttgtactgctcttgggcgtggactcagacttcagtctacagcagcagcctacttcccatcagagcctgcatcacctgttcttaagacaaccattcctggtcccaagagctcagaaagactagctgagttgggaaaagtatttgataacagagctgcttactttgctgccaattactataactctattggcaattacattgcagacgttgatggaaaccagtatttggacgtgtatgctcagattgcttccattgccctgggttataataacccagagattttgaagacagcaaaatcagatcaaatggccaatgctttggcaaatcgtccagctttggcatgttttccttctagtgattaccaacagattttagaagacggaatcttggcagccgctcccaagggcatgtccaaggtatggactgccctttctggatccgacgctaacgaaactgctttcaaggctgccttcatataccatgcagcaaagaaacgaggcaataacactttcagccccaaggaattagaatctgtcatgcaaaacttggtacctggagcttctgacgctgcgattctgtcttttgagaaaggattccatggcaggctgtttggatcgttgtctaccaccagatccaagccaatccacaaactggacattcccgccttcaactggccaaaggctccgtttccaagcttgaaatatcccctagaccagtttgtaactgagaacaaaaaggaggaagaaaggtgtctcgctgagttcgagaaggtgatccaacaatggtccacccagattgctgcaatcattattgagccaatccagtctgaaggtggtgataatcatgcctcaccgtcatttttccagagcttgagagatctcactctcaaatacgatattctcatgattgtggatgaagtccagactggtgttggtgcctctggcaaattctgggctcacgaacactggaacctaactacaccaccggacatggtcaccttctccaagaagttccaggctgccggattttacttcgcacttccagaattgcagccaagcctaccgttcagacaatttaatacatggtgtggtgatccgtcaaaggcattaattgcaagaaccgtatatcaggaaatcagcaagtacaacctggttgagaatgcggcaaccacaggtgcttatctctacgggaaactggaatcactgtctggtgaatattcgtcaatcttcaaccttagaggtcagagtactggcacttttattgcttgggatatgtcgtcgagtgctaagcgggacatgttcctcatcgagtcccggaagttgggtttgaacatcggtggatgtggtgatgtatctgtgcggctcaggcctactttggtgtttgaggaaaaacatgctgatgtgctcgtggatattgcagaagaggccctgaaaagactcgggtag

SEQ ID NO: 251 - DNA, 1530 bp, Pichia farinosa
atgggcatgagtctgaaaagaggatatatacaaggcaaggtgattgccaattgtgttggaaaacgggtgtttttgaacggtggggtggccaggaggccttactcgagtgttgcggaggaatactttccagacgagccatccaagccagtggtgacgagcagccagatccccgggcccagcagcatcaagttgaccaaggagctcgggcgttcgttcgatagcaacgctctgtactttataagcgactattttaactccaagggcaattatatttcggacgcagatgggaacaagctcttggatgtgtacgcgcagattgcgtctattccgctaggttacaacaacccagcgttgatcgagactgcccgcctggacgtgatggtgaatgcgcttgtcaacagaccggcgttggcgtgcttcccctcgatagactacggcaagatcttatcggagggtattcttgcagctgcccccaagggtatggggcatgtgtggacggcgttatcgggttcttgcgccaatgagactgcgttcaaggctgccttcatctatcagaatgccaagaggagaggctctttggatgtctctgccgaagaactagcctcttgtatggataataagccgcctggaagctccgacatggtgattttgtcatttgacaaaggattccacggcaggttatttggctccttatctgctacaagaagcaagcctattcacaaattggatatgccagcgttcccctggcctagagcccccttccctcaattgaagtatcctttgaaagatcacgtcaaggagaaccacgaggaagaagaaagatgtctcgcagagcttgagaacatcataaccaagaaagttgcccctaataaaatagcggctataatcgtggagcctgtacaatcagaaggtggagacaaccatgcttcttcattctttttccaatctttgagagacataaccctcaaacacgagatattgctcatagtcgacgaggttcagaccggtgtaggagcatctgggaaattctgggcccacgaacattggaaccttctgactcctccagacatggtaacattttccaagaagttccaggctgctggattctacttcagcgacccaaaattgcaacctaaggaaccctacagacagtttaatacctggtgtggcgatccttctaaagcgttacttgccagaagcatctaccaagaaataactaaaaacgaccttgtcaccaagacagccgaggtgggcagctacatatacgagaacttggaggcaatgttttcgaagtatgagggccacgtacaaaacttgagaggaaagaactacggtactttcattgcctgggaccacagttcgcccgcagaaagagatcagttcatatctctctgtcgctcaaagggactcaacattggaggctgtggatcggccgctgttcgtctcagaccctgcttggtgtttgggaagaagcacgcagacataatgctttccatcatcgaagatgtcctcaaaactcttagaggctag

SEQ ID NO: 252 - DNA, 1413 bp, Candida guilliermondii
atgtccatctgcgaaaagtacttcccaagagagccatccgctccagtcgtttccagttcctcaactggcgaagcttccaaggcagaaatcaagaccttggacaagaccttcgactccagagctgcatacttcgttgcagactaccaaaagtccgaaggtaactacatcgcagacgtcgacggtaacttgtacttggacgtctacgcacaaatcgcatccatcccattgggttacaacaacccagaattgatcaagaccgctaagtccgacaagatgatcagagcaatcgttgacagaccagccatgggtaacttccctggtgccgacttgaaggaaatcacctccaagttgttggagttcgcaccaaagggtcaagacaagttgtggtctggtttgtccggtgccgacgctgttgaattggctttcaaggcagtcttcttctggtatcaatccaagaagagaggctacgcaaagccattcaccgctgaagagaacgaatccgtcatgaagaaccaagctccaggttccccagaattggcaatcttgtccttcgagagatccttccacggtagattgttcgcctccggttccactacctgttccaagccaatccacaagatggacttgccatccttcaagtggccaaaggcccaatacccttcctacaagtacccattggaagaacacaaggaagaaaacaagcgtgaggacgaaagatgtttgaagatcgttgaagacatcttctccacctggaagtgcccaatcgctggcttgttgatcgaacctatccaatccgaaggtggcgacaaccacggttccgctgagttcttccaaggtttgagagacatcaccatcaagcacggtgctttgttgatcatggacgaagtccaaaccggtgttggtgcaaccggcaccttctggtgtcacgaacacttcaacttgtctcctccaccagacttggttaccttctccaagaagttccaatctgctggctacttcttccacgaccctgaattggttccagacttcgcataccgtcaattcaacacctggtgtggtgacccagccagaatgatcttggctggtgcaatcggtgacgaaatcgtcaagcacgacttagccgcaaaggcacaagaagttggtgactacttgttcaagaagttggaatctttgcaatccaagtacccaaagtacttgcaaaacttgagaggcaagaacagagcaaccttcatcgcttgggacttgccttccggtgacgctagaaacaagttcttgtccgacatgagagcagctggtgtcaacatcggtggttgtgctgaggcttccgttagattgagaccaaccttggtcttcgaacaaaagcacgcagacatcttggtcgcagcaatcgaaaaggtcttgggttcctactga

SEQ ID NO: 253 - DNA, 1416 bp, Issatchenkia orientalis
atgtcttacgcttcaagatattttccgaacgagccaaccgctccaaaggttgtcactgagtcaattccaggtccaaagggtaaatctgccattgcttctttaggtgaagtctttgataataggtgtgcttattttgttgctgattatgagaaatccgttggaaattacattgtagatgttgatggaaatgttcttcttgatgcatatgcacaaattgcttctattccactaggttacaacaatccaaagttaattgaggttgcaaagtctgacaagatgactagagcgatcgttaacagacccgctttaggtaacttccccggtgcagattttgagcaaatgcaaagggatttattgaaacacgcaccaaagggccaaactcacgtttggaatggtttatctggtgcagatgctaacgagttagctttcaaggctgttttcttcaactaccaatccaaaaaaaggggttttgataaaccatttactaaagaggaggaagtatcctgtatggaaaacatggctccaggtaaccctgaaattgctattttgtcttttaagaaggctttccatggtagattatttgcctccggttctgtaactagatcaaagcctgttcacaaaatggatatgccatcatttgcttggccaacagcagaattcccagcttataagtatccattagaagaaaacgaggaagcaaacatggcagaagatgcaagatgtttagcaattgttgaagatagattgcagaactggaaatgcccaattgctggagtcattgttgagccagtccaatctgaaggtggtgacaatcacgcttcagccgcattcttccaaggcttgagagatttaacccttaagtatggtgctaagctaatcatcgatgaggttcaagctggttgtggtgccactggtattatgtgggaccacgagagatataacatcactcctccaccagatcttgtcacattttctaagaagatgcaatccgctggttactggttccatgacccagagttgatcccaaatcaaccatacagacaattcaacacatggtgtggtgatccaaagggtgtaattttagctgcagctatttgtgatgaagttgttgataacaacttgttggagccattgagggagactggtgattatttttactcaaagctggaatctatccagaaacaatacccaaaactaatctccaatctaagaggtaaaggaaaagcatgcttccttgcatttgatatgccttctggttccctgagagcagatttcttgggtaagatgaagcttgcaggtgttaatgtcggaggttgtgctgatgttggtgttagattaagaccaggattaacatttgagaagaaacacgttgacattttcatcgcagctatggaaaaagtcttaccaactctgtaa

SEQ ID NO: 254 - DNA, 1428 bp, Saccharomyces kluyveri; identical to SEQ ID NO: 142

SEQ ID NO: 255 - DNA, 23 bp, Issatchenkia orientalis
cgaaccaattcaagaaaaccaac

SEQ ID NO: 256 - DNA, 20 bp, Issatchenkia orientalis
ggtccttacatctgtctagt

SEQ ID NO: 257 - DNA, 20 bp, Issatchenkia orientalis
ttgttgccatctgcatccac

SEQ ID NO: 258 - DNA, 20 bp, Issatchenkia orientalis
cgctacgatacgctacgata

SEQ ID NO: 259 - DNA, 25 bp, Issatchenkia orientalis
ctccttcatttaactataccagacg

SEQ ID NO: 260 - DNA, 20 bp, Issatchenkia orientalis
gaagggggtccaagttatcc

SEQ ID NO: 261 - DNA, 21 bp, Issatchenkia orientalis
ccaacaatcttaattggtgac

SEQ ID NO: 262 - DNA, 20 bp, Issatchenkia orientalis
gatatgggcggtagagaaga

SEQ ID NO: 263 - DNA, 20 bp, Issatchenkia orientalis
gctccttcaaaggcaacaca

SEQ ID NO: 264 - DNA, 20 bp, Issatchenkia orientalis
tgaactatcacatgaacgta

SEQ ID NO: 265 - DNA, 20 bp, Issatchenkia orientalis
tcaaggtagggtcacttaac

SEQ ID NO: 266 - DNA, 23 bp, Issatchenkia orientalis
tccataatccaatagatcatccc

SEQ ID NO: 267 - DNA, 22 bp, Issatchenkia orientalis
aacacaatggaaccaacctagt

SEQ ID NO: 268 - DNA, 20 bp, Issatchenkia orientalis
cgcatacattatggtagatg

SEQ ID NO: 269 - DNA, 20 bp, Issatchenkia orientalis
gattgaagattcttacaggc

SEQ ID NO: 270 - DNA, 20 bp, Issatchenkia orientalis
agggtaccttagtacgaagg

SEQ ID NO: 271 - DNA, 20 bp, Issatchenkia orientalis
ctattcttacgatgaaggcg

SEQ ID NO: 272 - DNA, 31 bp, Issatchenkia orientalis
tagttaattaattacagagttggtaagactt

SEQ ID NO: 273 - DNA, 33 bp, Issatchenkia orientalis
gactctagataaaatgtcttacgcttcaagata

SEQ ID NO: 274 - DNA, 18 bp, Issatchenkia orientalis
gtcagactttgcaacctc

SEQ ID NO: 275 - DNA, 21 bp, Issatchenkia orientalis
atgtaaacgtccaacaacttg

SEQ ID NO: 276 - DNA, 20 bp, Issatchenkia orientalis
gtacttcccaagagagccat

SEQ ID NO: 277 - DNA, 20 bp, Issatchenkia orientalis
gatgtcgtagtagtcggtag

SEQ ID NO: 278 - DNA, 20 bp, Issatchenkia orientalis
cgaagcaaacaacttggttg

SEQ ID NO: 279 - DNA, 21 bp, Issatchenkia orientalis
atgccaatgctggtctgtttg

1. A recombinant yeast cell comprising an active 3-HP pathway capable of producing 3-HP and a heterologous polynucleotide encoding an aminotransferase of E.C. 2.6.1.19, wherein:
(a) the aminotransferase comprises the motif (A,C)-Xn-(GSLS)-Xn-SKA(L/l)(L/l);
(b) the aminotransferase has β-alanine aminotransferase (BAAT) activity; and
(c) the aminotransferase is other than a S. kluyveri, I. orientalis, or S. avermitilis aminotransferase.

2. The recombinant cell of claim 1, wherein the aminotransferase comprises:
(i) AC at a positions corresponding to positions 103-104 of SEQ ID NO: 20;
(ii) GSLS at positions corresponding to positions 194-197 of SEQ ID NO: 20; and
(iii) SKA(L/l)(L/l) at positions corresponding to positions 354-358 of SEQ ID NO: 20.

3. A recombinant yeast cell comprising an active 3-HP pathway and a heterologous polynucleotide encoding a β-alanine aminotransferase (BAAT), wherein the BAAT has at least 80% sequence identity to SEQ ID NO: 206, SEQ ID NO: 207, SEQ ID NO: 208, SEQ ID NO: 209, SEQ ID NO: 218, SEQ ID NO: 220, SEQ ID NO: 222, SEQ ID NO: 224, SEQ ID NO: 226, SEQ ID NO: 228, SEQ ID NO: 230, SEQ ID NO: 232, or SEQ ID NO: 234; and wherein the cell capable of producing 3-HP.

4. The recombinant cell of claim 3, wherein the β-alanine aminotransferase (BAAT) comprises the motif (A,C)-Xn-(GSLS)-Xn-SKA(L/l)(L/l).

5. The recombinant cell of claim 4, wherein the β-alanine aminotransferase (BAAT) comprises:
(i) AC at a positions corresponding to positions 103-104 of SEQ ID NO: 20;
(ii) GSLS at positions corresponding to positions 194-197 of SEQ ID NO: 20; and
(iii) SKA(L/l)(L/l) at positions corresponding to positions 354-358 of SEQ ID NO: 20.

6. The recombinant cell of claim 3, wherein the β-alanine aminotransferase (BAAT) has an amino acid sequence comprising or consisting of SEQ ID NO: 206, SEQ ID NO: 207, SEQ ID NO: 208, SEQ ID NO: 209, SEQ ID NO: 218, SEQ ID NO: 220, SEQ ID NO: 222, SEQ ID NO: 224, SEQ ID NO: 226, SEQ ID NO: 228, SEQ ID NO: 230, SEQ ID NO: 232, or SEQ ID NO: 234.

7. The recombinant cell of claim 3, wherein the heterologous polynucleotide comprises a coding sequence having at least 80% sequence identity to SEQ ID NO: 239, SEQ ID NO: 240, SEQ ID NO: 241, SEQ ID NO: 242, SEQ ID NO: 243, SEQ ID NO: 244, SEQ ID NO: 245, SEQ ID NO: 246, SEQ ID NO: 247, SEQ ID NO: 248, SEQ ID NO: 249, SEQ ID NO: 250, or SEQ ID NO: 251.

8. The recombinant cell of claim 3, wherein the heterologous polynucleotide has a coding sequence that comprises or consists of SEQ ID NO: 239, SEQ ID NO: 240, SEQ ID NO: 241, SEQ ID NO: 242, SEQ ID NO: 243, SEQ ID NO: 244, SEQ ID NO: 245, SEQ ID NO: 246, SEQ ID NO: 247, SEQ ID NO: 248, SEQ ID NO: 249, SEQ ID NO: 250, or SEQ ID NO: 251.

9. The recombinant cell of claim 1, wherein the aminotransferase lacks an N-terminal mitochondrial target sequence (MTS).

10. The recombinant cell of claim 1, wherein the active 3-HP pathway proceeds through a β-alanine and/or malonate semialdehyde intermediate.

11. The recombinant yeast cell of claim 1, wherein the cell produces a greater amount of 3-HP compared to the cell without the heterologous polynucleotide encoding the β-alanine aminotransferase (BAAT), when cultivated under identical conditions (e.g., at least 10%, at least 15%, at least 20%, at least 25%, at least 30%, at least 35%, at least 40%, at least 45%, at least 50%, at least 75%, at least 100%, at least 150%, at least 200%, at least 250%, at least 300%, or at least 500% more).

12. The recombinant cell of claim 1, wherein the cell belongs to a genus selected from Candida, Kluyveromyces, Pichia, Issatchenkia, Schizosaccharomyces, Torulaspora, Zygosaccharomyces, and Saccharomyces.

13. The recombinant cell of claim 12, wherein the cell is selected from I. orientalis, C. lambica, and S. bulderi.

14. The recombinant cell of claim 1, wherein the cell is a CNB1 yeast cell.

15. A composition comprising the recombinant cell of claim 1, and a fermentable medium.

16. A method of producing 3-HP, comprising:
(a) cultivating the recombinant yeast cell of claim 1 in a fermentable medium under suitable conditions to produce 3-HP; and
(b) recovering the 3-HP.

17. A method of producing acrylic acid or a salt thereof, comprising:
(a) cultivating the recombinant cell of claim 1 in a fermentable medium under suitable conditions to produce 3-HP;
(b) recovering the 3-HP;
(c) dehydrating the 3-HP under suitable conditions to produce acrylic acid or a salt thereof; and
(d) recovering the acrylic acid or salt thereof.

18. A method of producing a 3-HP ester, comprising:
(a) cultivating the recombinant cell of claim 1 in a fermentable medium under suitable conditions to produce 3-HP;
(b) recovering the 3-HP;
(c) esterifying the 3-HP under suitable conditions to produce a 3-HP ester; and
(d) recovering the 3-HP ester

19. A method of producing 1,3-propanediol, comprising:
(a) cultivating the recombinant cell of claim 1 in a fermentable medium under suitable conditions to produce 3-HP;
(b) recovering the 3-HP;
(c) hydrogenating the 3-HP under suitable conditions to produce 1,3-propanediol; and
(d) recovering the 1,3-propanediol.

20. The method of claim 16 wherein the recombinant cell is a CNB1 cell cultivated in a fermentable medium comprising less than 1% pentose sugars.
